(19) United States
(12) Patent Application Publication
(10) Pub. No.: US 2025/0280834 A1
(43) Pub. Date: Sep. 11, 2025

(54) CONTROL OF INSECT PESTS

(71) Applicants: THE UNIVERSITY OF QUEENSLAND, St. Lucia (AU); HORTICULTURE INNOVATION AUSTRALIA LIMITED, North Sydney, New South Wales (AU); COTTON RESEARCH AND DEVELOPMENT CORPORATION, Narrabri, New South Wales (AU)

(72) Inventors: Neena MITTER, Pullenvale, Queensland (AU); Ritesh Gyanchandaji JAIN, Bald Hills, Queensland (AU); Stephen John FLETCHER, Taringa, Queensland (AU); Aris PANAYI, Laverton North, Victoria (AU); Kieran MURPHY, Laverton North, Victoria (AU)

(21) Appl. No.: 18/692,317

(22) PCT Filed: Sep. 15, 2022
(86) PCT No.: PCT/AU2022/051113

§ 371 Date: Mar. 14, 2024

(30) Foreign Application Priority Data
Sep. 15, 2021 (AU) 2021902978

(51) Int. Cl. A01N 63/60; A01P 7/04

(52) U.S. Cl. CPC A01N 63/60; A01P 7/04

(57) ABSTRACT

The present disclosure provides methods and compositions to control pests that cause damage to crop plants, for example, to control whitefly. The methods and compositions disclosed employ one or more silencing elements that decrease the level of one or more target sequences in the pest.

[0001] The text file named “208130PCT Sequence Listing_v230”, created on Nov. 15, 2024, and sized 1,727,032 bytes, which contains sequence ID listings, is herein expressly incorporated by reference.

### TECHNICAL FIELD

[0002] The disclosure relates generally to the control of pests that cause damage to crop plants, and more particularly to the control of whitefly using interfering RNA molecules.

### BACKGROUND OF INVENTION

[0003] Insect pests are major constraints to agricultural productivity, and their impacts have been reported to reduce crop yields by 10-16% globally. Several pest species are responsible for altering the natural ecosystem functioning and disrupting biodiversity. Genetically modified (GM) crops such as corn, cotton and soybean that express Bacillus thuringiensis (Bt) have been shown to be effective for controlling herbivorous pests. However, Bt technology is ineffective against sap-sucking insect pests belonging to the order Hemiptera. This group of insects comprises whiteflies, aphids, psyllids, plant bugs and leafhoppers.

[0004] Whiteflies are highly invasive and polyphagous insect pests, causing substantial economic losses to more than 600 plant species. They have gained the status of key agricultural pest due to direct damage by sap feeding, competency in virus transmission, and honeydew excretion, which promotes sooty mould on leaves and fruits and thereby reducing market value of produce. Whiteflies can transmit over 200 plant viruses and with Bemisia tabaci B and Q biotypes being the prominent agricultural pests of vegetables, fibres, and ornamental crops. The economic damage caused B. tabaci throughout the world is more than $US300 million per year.

[0005] Insecticides are the preferred way of controlling B. tabaci populations in agricultural systems. However, insecticide use has led to resistance in B. tabaci. Currently, B. tabaci has exhibited resistance to more than 60 active ingredients including neonicotinoid, organophosphate and pyrethroid insecticides.

[0006] As such, effective control measures against B. tabaci are required.

### SUMMARY OF INVENTION

[0007] Methods and compositions are provided which employ one or more silencing elements that, when ingested by or contacted with an insect plant pest, such as Bemisia tabaci; B. argentifolii Bellows & Perring; Dialeurodes citri Ashmead Trialeurodes abutiloneus, or T. vaporariorum Westwood plant pest, can decrease gene expression of one or more target sequences (e.g., mRNAs) by, for example, inhibiting translation or directly causing degradation of the target sequence(s).

[0008] In some embodiments, the methods and compositions of the invention reduce the level of one or more target sequences in the pest.

[0009] In certain embodiments, the decrease in the level of the one or more target sequences controls one or more of the pests, and thereby the methods and compositions are capable of limiting damage to a plant.

[0010] Described herein are various target polynucleotide sequences, or variants, isoforms, or fragments thereof, or complements thereof. The target sequences may be, for example, involved in growth, development, fecundity, metabolism, feeding behaviour, fitness, or insecticide tolerance of the insect plant pest. Also provided are silencing elements, which when ingested by or contacted with the pest, decrease the level of one or more of the target polynucleotide sequences.

[0011] The present inventors have surprising found that silencing specific whitefly genes results in significant whitefly mortality and that silencing elements the target RNA transcripts of these genes can be used to control whitefly. Significantly, not all genes targeted resulted in whitefly mortality.

[0012] Accordingly, the present disclosure provides a silencing element comprising at least one double-stranded RNA region, at least one strand of which comprises a polynucleotide that is complementary to a RNA transcript of:
[0013] (a) a nucleotide sequence comprising the sequence of any one of SEQ ID NOS: 1-35; or variants and fragments thereof, and complements thereof;
[0014] (b) a nucleotide sequence comprising at least 70% sequence identity to the sequence of any one of SEQ ID NOS: 1-35; or variants and fragments thereof, and complements thereof; or
[0015] (c) a nucleotide sequence comprising at least 19 consecutive nucleotides of the sequence of any one of SEQ ID NOS: 1-35; or variants and fragments thereof, and complements thereof;
   wherein the silencing element has insecticidal activity against an insect plant pest.

[0016] The present inventors have surprising found that targeting a nucleotide sequence comprising a nucleotide sequence shown in any one of SEQ ID NOS: 36-104 results in greater than 25% whitefly mortality (of adults, nymphs and/or eggs).

[0017] Accordingly, the present disclosure provides a silencing element comprising at least one double-stranded RNA region, at least one strand of which comprises a polynucleotide that is complementary to:
[0018] (a) a nucleotide sequence comprising the sequence of any one of SEQ ID NOS: 36-104; or variants, isoforms and fragments thereof, and complements thereof;
[0019] (b) a nucleotide sequence comprising at least 70% sequence identity to the sequence of any one of SEQ ID NOS: 36-104; or variants, isoforms and fragments thereof, and complements thereof; or
[0020] (c) a nucleotide sequence comprising at least 19 consecutive nucleotides of the sequence of any one of SEQ ID NOS: 36-104; or variants, isoforms and fragments thereof, and complements thereof;
   wherein the silencing element has insecticidal activity against an insect plant pest.

[0021] The present inventors have surprising found that targeting a nucleotide sequence comprising a nucleotide sequence shown in any one of SEQ ID NOS: 70-89, 91-95, or 100 results in greater than 50% whitefly mortality.

[0022] Accordingly, the present disclosure provides a silencing element comprising at least one double-stranded RNA region, at least one strand of which comprises a polynucleotide that is complementary to:
[0023] (a) a nucleotide sequence comprising the sequence of any one of SEQ ID NOS: 70-89, 91-95, 100; or variants, isoforms and fragments thereof, and complements thereof;
[0024] (b) a nucleotide sequence comprising at least 70% sequence identity to the sequence of any one of SEQ ID NOS: 70-89, 91-95, 100; or variants, isoforms and fragments thereof, and complements thereof; or
[0025] (c) a nucleotide sequence comprising at least 19 consecutive nucleotides of the sequence of any one of SEQ ID NOS: 70-89, 91-95, 100; or variants, isoforms and fragments thereof, and complements thereof;
   wherein the silencing element has insecticidal activity against an insect plant pest.

[0026] In some embodiments the silencing element comprises at least one double-stranded RNA region, at least one strand of which comprises a polynucleotide that is complementary to:
[0027] (a) a nucleotide sequence comprising the sequence any one of SEQ ID NOS: 70, 72, 74-89, 95, 100; or variants, isoforms, and fragments thereof, and complements thereof;
[0028] (b) a nucleotide sequence comprising at least 70% sequence identity to the sequence of any one of SEQ ID NOS: 70, 72, 74-89, 95, 100; or variants, isoforms and fragments thereof, and complements thereof; or
[0029] (c) a nucleotide sequence comprising at least 19 consecutive nucleotides of the sequence of any one of SEQ ID NOS: 70, 72, 74-89, 95, 100; or variants, isoforms and fragments thereof, and complements thereof.

[0030] In other embodiments, the silencing element comprises at least one double-stranded RNA region, at least one strand of which comprises a polynucleotide that is complementary to:
[0031] (a) a nucleotide sequence comprising the sequence any one of SEQ ID NOS: 70-89, 92; or variants, isoforms, and fragments thereof, and complements thereof;
[0032] (b) a nucleotide sequence comprising at least 70% sequence identity to the sequence of any one of SEQ ID NOS: 70-89, 92; or variants, isoforms and fragments thereof, and complements thereof; or
[0033] (c) a nucleotide sequence comprising at least 19 consecutive nucleotides of the sequence of any one of SEQ ID NOS: 70-89, 92; or variants, isoforms and fragments thereof, and complements thereof.

[0034] In other or further embodiments, the silencing element comprises at least one double-stranded RNA region, at least one strand of which comprises a polynucleotide that is complementary to:
[0035] (a) a nucleotide sequence comprising the sequence any one of SEQ ID NOS: 91, 93-95, 100; or variants, isoforms, and fragments thereof, and complements thereof;
[0036] (b) a nucleotide sequence comprising at least 70% sequence identity to the sequence of any one of SEQ ID NOS: 91, 93-95, 100; or variants, isoforms and fragments thereof, and complements thereof; or
[0037] (c) a nucleotide sequence comprising at least 19 consecutive nucleotides of the sequence of any one of SEQ ID NOS: 91, 93-95, 100; or variants, isoforms and fragments thereof, and complements thereof.

[0038] In other embodiments, the silencing element comprises at least one double-stranded RNA region, at least one strand of which comprises a polynucleotide that is complementary to:
[0039] (a) a nucleotide sequence comprising the sequence any one of SEQ ID NOS: 70, 72, 74, 75, 77-89; or variants, isoforms and fragments thereof, and complements thereof;
[0040] (b) a nucleotide sequence comprising at least 70% sequence identity to the sequence of any one of SEQ ID NOS: 70, 72, 74, 75, 77-89; or variants, isoforms and fragments thereof, and complements thereof; or
[0041] (c) a nucleotide sequence comprising at least 19 consecutive nucleotides of the sequence of any one of SEQ ID NOS: 70, 72, 74, 75, 77-89; or variants, isoforms and fragments thereof, and complements thereof.

[0042] In other or further embodiments, the silencing element comprises at least one double-stranded RNA region, at least one strand of which comprises a polynucleotide that is complementary to:
[0043] (a) a nucleotide sequence comprising the sequence SEQ ID NO: 95 or 100; or variants, isoforms and fragments thereof, and complements thereof;
[0044] (b) a nucleotide sequence comprising at least 70% sequence identity to the sequence of SEQ ID NOS: 95 or 100; or variants, isoforms and fragments thereof, and complements thereof; or
[0045] (c) a nucleotide sequence comprising at least 19 consecutive nucleotides of the sequence of SEQ ID NO: 95 or 100; or variants, isoforms and fragments thereof, and complements thereof.

[0046] The present inventors have surprising found that targeting a nucleotide sequence comprising a nucleotide sequence shown in any one of SEQ ID NOS: 77, 80, 82-86, 88, 91-95, or 100 results in greater than 80% whitefly mortality.

[0047] Accordingly, the present disclosure also provides a silencing element comprising at least one double-stranded RNA region, at least one strand of which comprises a polynucleotide that is complementary to:
[0048] (a) a nucleotide sequence comprising the sequence any one of SEQ ID NOS: 77, 80, 82-86, 88, 91-95, or 100; or variants, isoforms and fragments thereof, and complements thereof;
[0049] (b) a nucleotide sequence comprising at least 70% sequence identity to the sequence of any one of SEQ ID NOS: 77, 80, 82-86, 88, 91-95, or 100; or variants, isoforms and fragments thereof, and complements thereof; or
[0050] (c) a nucleotide sequence comprising at least 19 consecutive nucleotides of the sequence of any one of SEQ ID NOS: 77, 80, 82-86, 88, 91-95, or 100; or variants, isoforms and fragments thereof, and complements thereof.

[0051] In some embodiments the silencing element comprises at least one double-stranded RNA region, at least one strand of which comprises a polynucleotide that is complementary to:
[0052] (a) a nucleotide sequence comprising the sequence any one of SEQ ID NOS: 77, 80, 82-86, 88, 95, or 100; or variants, isoforms and fragments thereof, and complements thereof;

[0053] (b) a nucleotide sequence comprising at least 70% sequence identity to the sequence of any one of SEQ ID NOS: 77, 80, 82-86, 88, 95, or 100; or variants, isoforms and fragments thereof, and complements thereof; or

[0054] (c) a nucleotide sequence comprising at least 19 consecutive nucleotides of the sequence of any one of SEQ ID NOS: 77, 80, 82-86, 88, 95, or 100; or variants, isoforms and fragments thereof, and complements thereof.

[0055] In other embodiments, the silencing element comprises at least one double-stranded RNA region, at least one strand of which comprises a polynucleotide that is complementary to:
[0056] (a) a nucleotide sequence comprising the sequence any one of SEQ ID NOS: 77, 80, 82-86, 88, 92; or variants, isoforms and fragments thereof, and complements thereof;
[0057] (b) a nucleotide sequence comprising at least 70% sequence identity to the sequence of any one of SEQ ID NOS: 77, 80, 82-86, 88, 92; or variants, isoforms and fragments thereof, and complements thereof; or
[0058] (c) a nucleotide sequence comprising at least 19 consecutive nucleotides of the sequence of any one of SEQ ID NOS: 77, 80, 82-86, 88, 92; or variants, isoforms and fragments thereof, and complements thereof.

[0059] In other or further embodiments, the silencing element comprises at least one double-stranded RNA region, at least one strand of which comprises a polynucleotide that is complementary to:
[0060] (a) a nucleotide sequence comprising the sequence any one of SEQ ID NOS: 91, 93-95, 100; or variants, isoforms and fragments thereof, and complements thereof;

[0061] (b) a nucleotide sequence comprising at least 70% sequence identity to the sequence of any one of SEQ ID NOS: 91, 93-95, 100; or variants, isoforms and fragments thereof, and complements thereof; or

[0062] (c) a nucleotide sequence comprising at least 19 consecutive nucleotides of the sequence of any one of SEQ ID NOS: 91, 93-95, 100; or variants, isoforms and fragments thereof, and complements thereof.

[0063] In other embodiments, the silencing element comprises at least one double-stranded RNA region, at least one strand of which comprises a polynucleotide that is complementary to:
[0064] (a) a nucleotide sequence comprising the sequence any one of SEQ ID NOS: 77, 80, 82-86, 88; or variants, isoforms and fragments thereof, and complements thereof;
[0065] (b) a nucleotide sequence comprising at least 70% sequence identity to the sequence of any one of SEQ ID NOS: 77, 80, 82-86, 88; or variants, isoforms and fragments thereof, and complements thereof; or
[0066] (c) a nucleotide sequence comprising at least 19 consecutive nucleotides of the sequence of any one of SEQ ID NOS: 77, 80, 82-86, 88; or variants, isoforms and fragments thereof, and complements thereof.

[0067] In other or further embodiments, the silencing element comprises at least one double-stranded RNA region, at least one strand of which comprises a polynucleotide that is complementary to:
[0068] (a) a nucleotide sequence comprising the sequence of SEQ ID NO: 95 or 100; or variants, isoforms and fragments thereof, and complements thereof;
[0069] (b) a nucleotide sequence comprising at least 70% sequence identity to the sequence of SEQ ID NO: 95 or 100; or variants, isoforms and fragments thereof, and complements thereof; or
[0070] (c) a nucleotide sequence comprising at least 19 consecutive nucleotides of the sequence of SEQ ID NOS: 95 or 100; or variants, isoforms and fragments thereof, and complements thereof.

[0071] The present disclosure also provides a composition comprising the silencing element of the disclosure. The composition may comprise two or more silencing elements that target different polynucleotide sequences. The combination of two or more silencing elements (e.g., dsRNAs) may result in increased insecticidal activity, pest mortality and/or pest control.

[0072] Accordingly, the present disclosure provides a composition comprising a first and second silencing element, wherein the
[0073] (i) first silencing element comprises at least one double-stranded RNA region, at least one strand of which comprises a polynucleotide that is complementary to:
   [0074] (a) a nucleotide sequence comprising the sequence of any one of SEQ ID NOS: 36-104; or variants, isoforms and fragments thereof, and complements thereof;
   [0075] (b) a nucleotide sequence comprising at least 70% sequence identity to the sequence of any one of SEQ ID NOS: 36-104; or variants, isoforms and fragments thereof, and complements thereof; or
   [0076] (c) a nucleotide sequence comprising at least 19 consecutive nucleotides of the sequence of any one of SEQ ID NOS: 36-104; or variants, isoforms and fragments thereof, and complements thereof; and
[0077] (ii) second silencing element comprises at least one double-stranded RNA region, at least one strand of which comprises a polynucleotide that is complementary to:
   [0078] (a) a nucleotide sequence comprising the sequence of any one of SEQ ID NOS: 36-104; or variants, isoforms and fragments thereof, and complements thereof;
   [0079] (b) a nucleotide sequence comprising at least 70% sequence identity to the sequence of any one of SEQ ID NOS: 36-104; or variants, isoforms and fragments thereof, and complements thereof; or
   [0080] (c) a nucleotide sequence comprising at least 19 consecutive nucleotides of the sequence of any one of SEQ ID NOS: 36-104; or variants, isoforms and fragments thereof, and complements thereof,
      wherein the composition has insecticidal activity against an insect plant pest.

[0081] In a further embodiment, the composition comprises a third silencing element, wherein the third silencing element comprises at least one double-stranded RNA region, at least one strand of which comprises a polynucleotide that is complementary to:
[0082] (a) a nucleotide sequence comprising the sequence of any one of SEQ ID NOS: 36-104; or variants and fragments thereof, and complements thereof;
[0083] (b) a nucleotide sequence comprising at least 70% sequence identity to the sequence of any one of SEQ ID NOS: 36-104; or variants, isoforms and fragments thereof, and complements thereof; or
[0084] (c) a nucleotide sequence comprising at least 19 consecutive nucleotides of the sequence of any one of SEQ ID NOS: 36-104; or variants, isoforms and fragments thereof, and complements thereof.

[0085] In one embodiment, the composition comprising a first and second silencing element, wherein the
[0086] (i) first silencing element comprises at least one double-stranded RNA region, at least one strand of which comprises a polynucleotide that is complementary to:
   [0087] (a) a nucleotide sequence comprising the sequence of SEQ ID NO: 94 or 95; or variants, isoforms and fragments thereof, and complements thereof;
   [0088] (b) a nucleotide sequence comprising at least 70% sequence identity to the sequence of SEQ ID NO: 94 or 95; or variants, isoforms and fragments thereof, and complements thereof; or
   [0089] (c) a nucleotide sequence comprising at least 19 consecutive nucleotides of the sequence of SEQ ID NO: 94 or 95; or variants, isoforms and fragments thereof, and complements thereof; and
[0090] (ii) second silencing element comprises at least one double-stranded RNA region, at least one strand of which comprises a polynucleotide that is complementary to:
   [0091] (a) a nucleotide sequence comprising the sequence of SEQ ID NO: 91; or variants and fragments thereof, and complements thereof;
   [0092] (b) a nucleotide sequence comprising at least 70% sequence identity to the sequence of SEQ ID NO: 91; or variants and fragments thereof, and complements thereof; or
   [0093] (c) a nucleotide sequence comprising at least 19 consecutive nucleotides of the sequence of SEQ ID NO: 91; or variants and fragments thereof, and complements thereof; and
      wherein the composition has insecticidal activity against an insect plant pest.

[0094] The present inventors have surprisingly found that the insecticidal activity of a silencing element can be improved by combination with a silencing element targeting the Deoxyribonuclease I (Nuclease-II).

[0095] Accordingly, the present disclosure provides a composition comprising a first and second silencing element, wherein the
[0096] (i) first silencing element comprises at least one double-stranded RNA region, at least one strand of which comprises a polynucleotide that is complementary to:
   [0097] (a) a nucleotide sequence comprising the sequence of SEQ ID NO: 101; or variants, isoforms and fragments thereof, and complements thereof;
   [0098] (b) a nucleotide sequence comprising at least 70% sequence identity to the sequence of SEQ ID NO: 101; or variants, isoforms and fragments thereof, and complements thereof; or
   [0099] (c) a nucleotide sequence comprising at least 19 consecutive nucleotides of the sequence of SEQ ID NO: 101; or variants, isoforms and fragments thereof, and complements thereof; and
[0100] (iii) second silencing element comprises at least one double-stranded RNA region, at least one strand of which comprises a polynucleotide that is complementary to:
   [0101] (a) a nucleotide sequence comprising the sequence of any one of SEQ ID NO: 36-104; or variants, isoforms and fragments thereof, and complements thereof;
   [0102] (b) a nucleotide sequence comprising at least 70% sequence identity to the sequence of SEQ ID NO: 36-104; or variants, isoforms and fragments thereof, and complements thereof; or
   [0103] (c) a nucleotide sequence comprising at least 19 consecutive nucleotides of the sequence of SEQ ID NO: 36-104; or variants, isoforms and fragments thereof, and complements thereof; and
      wherein the composition has insecticidal activity against an insect plant pest.

[0104] In one embodiment, the second silencing element comprises at least one double-stranded RNA region, at least one strand of which comprises a polynucleotide that is complementary to:
[0105] (a) a nucleotide sequence comprising the sequence of SEQ ID NO: 98 or 99; or variants, isoforms and fragments thereof, and complements thereof;
[0106] (b) a nucleotide sequence comprising at least 70% sequence identity to the sequence of SEQ ID NO: 98 or 99; or variants, isoforms and fragments thereof, and complements thereof; or
[0107] (c) a nucleotide sequence comprising at least 19 consecutive nucleotides of the sequence of SEQ ID NO: 98 or 99; or variants, isoforms and fragments thereof, and complements thereof.

[0108] In some embodiments the two or more silencing elements are provided as a single polynucleotide (e.g., dsRNA). In other embodiments, two or more polynucleotides (e.g., dsRNAs) are mixed together.

[0109] The present disclosure also provides a silencing element comprising at least one double-stranded RNA region, at least one strand of which comprises:
[0110] (a) a nucleotide sequence comprising the sequence of any one of SEQ ID NOS: 139-173; or variants and fragments thereof, and complements thereof;
[0111] (b) a nucleotide sequence comprising at least 70% sequence identity to the sequence of any one of nucleotides SEQ ID NOS: 139-173; or variants and fragments thereof, and complements thereof; or
[0112] (c) a nucleotide sequence comprising at least 19 consecutive nucleotides of the sequence of any one of SEQ ID NOS: 139-173; or variants and fragments thereof, and complements thereof;
   wherein the silencing element has insecticidal activity against an insect plant pest.

[0113] The present disclosure also provides a silencing element comprising at least one double-stranded RNA region, at least one strand of which comprises:
[0114] (a) a nucleotide sequence comprising the sequence any one of SEQ ID NOS: 139-158, 160-164, 169; or variants and fragments thereof, and complements thereof;
[0115] (b) a nucleotide sequence comprising at least 70% sequence identity to the sequence of any one of SEQ ID NOS: 139-158, 160-164, 169; or variants and fragments thereof, and complements thereof; or
[0116] (c) a nucleotide sequence comprising at least 19 consecutive nucleotides of the sequence of any one of SEQ ID NOS: 139-158, 160-164, 169; or variants and fragments thereof, and complements thereof.

[0117] The present disclosure also provides a silencing element comprising at least one double-stranded RNA region, at least one strand of which comprises:
[0118] (a) a nucleotide sequence comprising the sequence any one of SEQ ID NOS: 146, 149, 151-155, 157, 160-164, 169; or variants and fragments thereof, and complements thereof;
[0119] (b) a nucleotide sequence comprising at least 70% sequence identity to the sequence of any one of SEQ ID NOS: 146, 149, 151-155, 157, 160-164, 169; or variants and fragments thereof, and complements thereof; or
[0120] (c) a nucleotide sequence comprising at least 19 consecutive nucleotides of the sequence of any one of SEQ ID NOS: 146, 149, 151-155, 157, 160-164, 169; or variants and fragments thereof, and complements thereof.

[0121] The present disclosure also provides a silencing element comprising at least one double-stranded RNA region, at least one strand of which comprises:
[0122] (a) a nucleotide sequence comprising the sequence any one of SEQ ID NOS: 139-158, 161; or variants and fragments thereof, and complements thereof;
[0123] (b) a nucleotide sequence comprising at least 70% sequence identity to the sequence of any one of SEQ ID NOS: 139-158, 161; or variants and fragments thereof, and complements thereof; or
[0124] (c) a nucleotide sequence comprising at least 19 consecutive nucleotides of the sequence of any one of SEQ ID NOS: 139-158, 161; or variants and fragments thereof, and complements thereof.

[0125] The present disclosure also provides a silencing element comprising at least one double-stranded RNA region, at least one strand of which comprises:
[0126] (a) a nucleotide sequence comprising the sequence any one of SEQ ID NOS: 146, 149, 151-155, 157, 161; or variants and fragments thereof, and complements thereof;
[0127] (b) a nucleotide sequence comprising at least 70% sequence identity to the sequence of any one of SEQ ID NOS: 146, 149, 151-155, 157, 161; or variants and fragments thereof, and complements thereof; or
[0128] (c) a nucleotide sequence comprising at least 19 consecutive nucleotides of the sequence of any one of SEQ ID NOS: 146, 149, 151-155, 157, 161; or variants and fragments thereof, and complements thereof.

[0129] The present disclosure also provides a silencing element comprising at least one double-stranded RNA region, at least one strand of which comprises:
[0130] (a) a nucleotide sequence comprising the sequence any one of SEQ ID NOS: 160, 162-164, 169; or variants and fragments thereof, and complements thereof;
[0131] (b) a nucleotide sequence comprising at least 70% sequence identity to the sequence of any one of SEQ ID NOS: 160, 162-164, 169; or variants and fragments thereof, and complements thereof; or
[0132] (c) a nucleotide sequence comprising at least 19 consecutive nucleotides of the sequence of any one of SEQ ID NOS: 160, 162-164, 169; or variants and fragments thereof, and complements thereof.

[0133] Accordingly, the present disclosure provides a composition comprising a first and second silencing element, wherein the
[0134] (i) first silencing element comprises at least one double-stranded RNA region, at least one strand of which comprises:
   [0135] (a) a nucleotide sequence comprising the sequence of any one of SEQ ID NOS: 139-173; or variants and fragments thereof, and complements thereof;
   [0136] (b) a nucleotide sequence comprising at least 70% sequence identity to the sequence of any one of nucleotides SEQ ID NOS: 139-173; or variants, and fragments thereof, and complements thereof; or
   [0137] (c) a nucleotide sequence comprising at least 19 consecutive nucleotides of the sequence of any one of SEQ ID NOS: 139-173; or variants and fragments thereof, and complements thereof; and
[0138] (ii) second silencing element comprises at least one double-stranded RNA region, at least one strand of which comprises:
   [0139] (a) a nucleotide sequence comprising the sequence of any one of SEQ ID NOS: 139-173; or variants and fragments thereof, and complements thereof;
   [0140] (b) a nucleotide sequence comprising at least 70% sequence identity to the sequence of any one of SEQ ID NOS: 139-173; or variants, and fragments thereof, and complements thereof; or
   [0141] (c) a nucleotide sequence comprising at least 19 consecutive nucleotides of the sequence of any one of SEQ ID NOS: 139-173; or variants and fragments thereof, and complements thereof,
      wherein the composition has insecticidal activity against an insect plant pest.

[0142] In one embodiment, the composition comprises a third silencing element, wherein the third silencing element comprises at least one double-stranded RNA region, at least one strand of which comprises:
[0143] (a) a nucleotide sequence comprising the sequence of any one of SEQ ID NOS: 139-173; or variants and fragments thereof, and complements thereof;
[0144] (b) a nucleotide sequence comprising at least 70% sequence identity to the sequence of any one of SEQ ID NOS: 139-173; or variants, and fragments thereof, and complements thereof; or
[0145] (c) a nucleotide sequence comprising at least 19 consecutive nucleotides of the sequence of any one of SEQ ID NOS: 139-173; or variants and fragments thereof, and complements thereof.

[0146] Accordingly, the present disclosure provides a composition comprising a first and second silencing element, wherein the
[0147] (i) first silencing element comprises at least one double-stranded RNA region, at least one strand of which comprises:
   [0148] (a) a nucleotide sequence comprising the sequence of SEQ ID NO: 163 or 164; or variants and fragments thereof, and complements thereof;
   [0149] (b) a nucleotide sequence comprising at least 70% sequence identity to the sequence of SEQ ID NO: 163 or 164; or variants, and fragments thereof, and complements thereof; or
   [0150] (c) a nucleotide sequence comprising at least 19 consecutive nucleotides of the sequence of SEQ ID NO: 163 or 164; or variants and fragments thereof, and complements thereof; and
[0151] (ii) second silencing element comprises at least one double-stranded RNA region, at least one strand of which comprises:
   [0152] (a) a nucleotide sequence comprising the sequence of SEQ ID NO: 160; or variants and fragments thereof, and complements thereof;
   [0153] (b) a nucleotide sequence comprising at least 70% sequence identity to the sequence of SEQ ID NO: 160; or variants, and fragments thereof, and complements thereof; or
   [0154] (c) a nucleotide sequence comprising at least 19 consecutive nucleotides of the sequence of SEQ ID NO: 160; or variants and fragments thereof, and complements thereof,
      wherein the composition has insecticidal activity against an insect plant pest.

[0155] The present disclosure provides a composition comprising a first and second silencing element, wherein the
[0156] (i) first silencing element comprises at least one double-stranded RNA region, at least one strand of which comprises:
   [0157] (a) a nucleotide sequence comprising the sequence of SEQ ID NO: 170; or variants and fragments thereof, and complements thereof;
   [0158] (b) a nucleotide sequence comprising at least 70% sequence identity to the sequence of SEQ ID NO: 170; or variants, and fragments thereof, and complements thereof; or
   [0159] (c) a nucleotide sequence comprising at least 19 consecutive nucleotides of the sequence of SEQ ID NO: 170; or variants and fragments thereof, and complements thereof; and
[0160] (ii) second silencing element comprises at least one double-stranded RNA region, at least one strand of which comprises:
   [0161] (a) a nucleotide sequence comprising the sequence of any one of SEQ ID NOS: 139-173; or variants and fragments thereof, and complements thereof;
   [0162] (b) a nucleotide sequence comprising at least 70% sequence identity to the sequence of any one of SEQ ID NOS: 139-173; or variants, and fragments thereof, and complements thereof; or
   [0163] (c) a nucleotide sequence comprising at least 19 consecutive nucleotides of the sequence of any one of SEQ ID NOS: 139-173; or variants and fragments thereof, and complements thereof,
      wherein the composition has insecticidal activity against an insect plant pest.

[0164] In one embodiment, the second silencing element comprises at least one double-stranded RNA region, at least one strand of which comprises a polynucleotide that is complementary to:
[0165] (a) a nucleotide sequence comprising the sequence of SEQ ID NO: 167 or 168; or variants, isoforms and fragments thereof, and complements thereof;
[0166] (b) a nucleotide sequence comprising at least 70% sequence identity to the sequence of SEQ ID NO: 167 or 168; or variants, isoforms and fragments thereof, and complements thereof; or
[0167] (c) a nucleotide sequence comprising at least 19 consecutive nucleotides of the sequence of SEQ ID NO: 167 or 168; or variants, isoforms and fragments thereof, and complements thereof.

[0168] In some embodiments the two or more silencing elements are provided as a single polynucleotide (e.g., dsRNA). In other embodiments, two or more polynucleotides (e.g., dsRNAs) are mixed together.

[0169] Further provided are constructs (for example, expression constructs) encoding silencing elements

[0170] Two or more polynucleotides encoding silencing elements (e.g., dsRNAs) may be stacked into one construct.

[0171] In some embodiments, the construct is a DNA construct comprising one or more polynucleotides encoding one or more silencing elements of the disclosure.

[0172] In other embodiments, the construct is an expression construct comprising the DNA construct of the disclosure, wherein the one or more polynucleotides may be operably linked to one or more heterologous promoters.

[0173] In some embodiments, the polynucleotide is flanked by a first operably linked convergent promoter at one terminus of the polynucleotide and a second operably linked convergent promoter at the opposing terminus of the polynucleotide, wherein the first and the second convergent promoters are capable of driving expression of the silencing element.

[0174] Also provided are host cells, for example, bacterial cells, comprising one or more constructs encoding silencing elements of the disclosure. In some embodiments, the host cell is an inactivated bacterial cell.

[0175] In some embodiments, the host cell comprises an expression construct which comprises a transcriptional promoter operably linked to a DNA construct of the disclosure. The transcriptional promoter may be inducible by exposure of the host cell to an exogenous molecule, for example, IPTG.

[0176] Also provided are compositions comprising one or more sequence elements of the disclosure, one or more constructs of the disclosure, or one or more host cells of the disclosure. The composition may be in the form of a solid, suspension or colloid.

[0177] In some embodiments, the compositions comprise an agriculturally acceptable carrier. The carrier may facilitate application of the composition to plants to be protected from pests.

[0178] The compositions may also comprise an herbicide, an insecticide, a fungicide, a nematocide, and/or a bactericide, or combinations thereof.

[0179] In some embodiments, the composition is sprayable onto the leaves of the plant.

[0180] In some embodiments, the one or more silencing elements are adsorbed onto a carrier, for example, a synthetic carrier such as LDH particles. The LDH may be of the hydrotalcite group.

[0181] In some embodiments, the one or more silencing elements are loaded onto the LDH at a ratio of from 1:1 to 1:5 silencing element:LDH.

[0182] In some embodiments, 60% to 90% of the one or more silencing elements in the composition are adsorbed onto the LDH.

[0183] In some embodiments, the compositions comprise a penetrant which enhances the penetration of active compounds (e.g., silencing element or silencing element-LDH) into the plant, plant pest or both plant and plant pest.

[0184] Typically, the penetrant is adapted to dissolve or penetrate the wax layer on the leaf surface of plants. Examples of suitable penetrant may, for example, be selected from the group consisting of mineral oils, vegetable oils, esterified vegetable oils, fatty acid esters, polyalkoxylate surfactants, sugar-based surfactants and mixtures thereof.

[0185] The composition may comprise further components such an inert carrier, a preservative, a humectant, thickener, antifreeze, an encapsulating agent, a binder, an emulsifier, a dye, a UV protectant, a buffer, a flow agent, micronutrient donors, or other preparations that influence plant growth.

[0186] Plants, plant parts, plant cells, and other host cells (e.g., bacterial cells) or organisms comprising constructs encoding the silencing elements or an active variant or fragment thereof are also provided.

[0187] The disclosure provides a plant cell having stably incorporated into its genome a heterologous polynucleotide encoding a silencing element, wherein the polynucleotide comprises:
[0188] (a) a nucleotide sequence comprising the sequence of any one of SEQ ID NOS: 139-173; or variants and fragments thereof, and complements thereof;
[0189] (b) a nucleotide sequence comprising at least 70% sequence identity to the sequence of any one of SEQ ID NOS: 139-173; or variants and fragments thereof, and complements thereof; or
[0190] (c) a nucleotide sequence comprising at least 19 consecutive nucleotides of the sequence of any one of SEQ ID NOS: 139-173; or variants and fragments thereof, and complements thereof;
   wherein the silencing element has insecticidal activity against a plant pest.

[0191] In some embodiments, the plant cell comprises one or more constructs of the disclosure, encoding, dsRNAs for example.

[0192] In some embodiments, the plant cell is from a dicot such as, but not limited to, dicots. Examples of plant species of interest include, but are not limited to Row crops, Soybean, Cotton, Peanuts, Beans, Carrots, Tomato, Broccoli, Lettuce, Cucurbit crops such as Cucumber, Watermelon, Squash, Capsicum, Cabbage, Sweet potato, Eggplant, Ornamentals, Citrus, Chillies.

[0193] Also provided is a plant or plant part comprising the plant cell of the disclosure.

[0194] Also provided is a transgenic seed from the plant of the disclosure.

[0195] Also provided are formulations of sprayable silencing agents for topical applications to pest insects or substrates where pest insects may be found.

[0196] In another embodiment, methods for controlling an insect plant pest, such as, Bemisia tabaci; B. argentifolii Bellows & Perring; Dialeurodes citri Ashmead Trialeurodes abutiloneus, or T. vaporariorum Westwood plant pest, are provided. The methods comprise feeding to an insect plant pest a composition comprising one or more silencing elements, wherein the one or more silencing elements, when ingested by the pest, reduce the level of one or more target sequences in the pest and thereby control the pest. Alternatively, or in addition, the methods may comprise contacting the insect plant pest with a composition comprising one or more silencing elements, wherein the one or more silencing elements, when absorbed by the pest (e.g., through the insect cuticle), reduce the level of one or more target sequences in the pest and thereby control the pest.

[0197] Further provided are methods to protect a plant from an insect plant pest. Such methods comprise introducing into the plant or plant part a disclosed silencing element. When the plant expressing the silencing element is ingested by the pest, the level of the target sequence is decreased, and the pest is controlled.

[0198] In one embodiment, the disclosure provides a method for controlling an insect plant pest comprising feeding to the insect plant pest a composition comprising a silencing element, wherein the silencing element controls the plant pest, wherein the silencing element comprises a sequence complementary to:
[0199] (a) a nucleotide sequence comprising the sequence of any one of SEQ ID NOS: 36-104; or variants, isoforms and fragments thereof, and complements thereof;
[0200] (b) a nucleotide sequence comprising at least 70% sequence identity to the sequence of any one of nucleotides SEQ ID NOS: 36-104; or variants, isoforms and fragments thereof, and complements thereof; or
[0201] (c) a nucleotide sequence comprising at least 19 consecutive nucleotides of the sequence of any one of SEQ ID NOS: 36-104; or variants, isoforms and fragments thereof, and complements thereof;
   wherein the silencing element has insecticidal activity against an insect plant pest.

[0202] In another embodiment, the disclosure provides a method for controlling an insect plant pest comprising feeding to the insect plant pest a composition comprising a silencing element, wherein the silencing element controls the plant pest, wherein the silencing element comprises:
[0203] (a) a nucleotide sequence comprising the sequence of any one of SEQ ID NOS: 139-173; or variants and fragments thereof, and complements thereof;
[0204] (b) a nucleotide sequence comprising at least 70% sequence identity to the sequence of any one of SEQ ID NOS: 139-173; or variants and fragments thereof, and complements thereof; or
[0205] (c) a nucleotide sequence comprising at least 19 consecutive nucleotides of the sequence of any one of SEQ ID NOS: 139-173; or variants and fragments thereof, and complements thereof;
   wherein the silencing element has insecticidal activity against a plant pest.

[0206] In some embodiments, the composition comprises a plant or plant part treated with the silencing element adsorbed onto LDH particles.

[0207] In other embodiments, the composition comprises a plant or plant part having stably incorporated into its genome a polynucleotide encoding the silencing element. In some embodiments, the plant is a dicot such as, but not limited to, dicots. Examples of plant species of interest include, but are not limited to Row crops, Soybean, Cotton, Peanuts, Beans, Carrots, Tomato, Broccoli, Lettuce, Cucurbit crops such as Cucumber, Watermelon, Squash, Capsicum, Cabbage, Sweet potato, Eggplant, Ornamentals, Citrus, Chillies.

[0208] Also provided are kits comprising one or more silencing element of the disclosure, or one or more constructs of the disclosure, and instructions for using the silencing elements, or constructs as insecticidal agents against a plant pest.

[0209] In some embodiments, the instructions provide for sequential application of two or more silencing elements to reduce the incidence of the insect pest organism developing resistance to the one or more silencing elements.

[0210] In other embodiments, the instructions provide for concurrent application of two or more silencing elements to reduce the incidence of the insect pest organism developing resistance to the one or more silencing elements.

[0211] The present disclosure is not to be limited in scope by the specific examples described herein, which are intended for the purpose of exemplification only. Functionally-equivalent products, compositions and methods are clearly within the scope of the present disclosure.

[0212] Any example/embodiment of the present disclosure herein shall be taken to apply mutatis mutandis to any other example/embodiment of the disclosure unless specifically stated otherwise.

### BRIEF DESCRIPTION OF DRAWINGS

[0213] FIG. 1. Diet-mediated delivery of naked dsRNA and LDH-dsRNA (BioClay) causes whitefly mortality. a, Percentage mortality of adult whiteflies after feeding on artificial diet (AD) containing dsRNAs at a concentration of 200 ng/μl for 6 days. Sucrose and Green fluorescent protein (GFP) dsRNA were used as negative controls. AD assays were performed twice for each target dsRNA. Of the selected dsRNAs, fourteen dsRNA caused more than 80% mortality. b, Representative images of adult whiteflies after feeding on sucrose and GFP dsRNA and dead individuals after feeding on target dsRNA. c, Relative mRNA expression of selected B. tabaci genes after 4 days feeding on diet containing target dsRNAs. Relative mRNA levels of Aquaporin 1 (Aqp1), vacuolar ATPase A (v-ATPase A), Coatomer beta subunit (COPB1), Zinc finger protein (ZFP), Charged Multivesicular Body Protein 4C (CHM4C), Trehalase (TreH), and Acetylcholinesterase 1 (AchE1) were normalized using a rpl-6 as a reference gene. Of the tested target genes, Aqp1 showed the most significant gene knockdown on day four. d, The mortality of stingless bees feeding on syntaxin dsRNA via cotton pad soaking bioassays. e, Loading of dsRNA on LDH pre and post 6 days feeding. Complete loading was achieved at a dsRNA-LDH mass ratio of 1:4 and verified by agarose gel electrophoresis. The gel image indicates the differences in the migration of free dsRNA and LDH-dsRNA complexes. f, Adult whiteflies were fed on artificial diet containing naked AChE1, Aqp1, v-ATPase A dsRNAs or LDH bounded respective dsRNAs and mortality were recorded for 6 days. Of the selected target genes, Aqp1 caused the most significant whitefly mortality on day 6. Each AD assay was repeated two times. M=1 kb+ ladder. g, Relative expression of selected target genes in adult B. tabaci fed on diet mixed with GFP dsRNA or naked AChE1 (a), Aqp1 (b), v-ATPase A (c) dsRNA or corresponding LDH loaded dsRNA for four days. For qRT PCR, relative expression was normalized to an endogenous control rpl-6. Of the three selected target genes, Aqp1 bounded LDH showed the most significant gene silencing in B. tabaci as compared to GFP dsRNA. The asterisks above the bar represent the significant difference between controls and treatments (One-way ANOVA, Tukey's test was used for mortality studies and Student's t-test followed by Welch's correction performed for gene knockdown analysis *P<0.05, **P<0.001, ****P<0.0001).

[0214] FIG. 2. Screening of potential targets genes in whitefly. Percentage mortality of adult whiteflies after feeding on artificial diet (AD) containing dsRNAs at a concentration of 200 ng/μl for 6 days. Sucrose and Green fluorescent protein (GFP) dsRNA were used as negative controls. AD assays were performed twice for each target dsRNA. Of the selected dsRNAs, twelve dsRNA caused less than 80% mortality. AD assays were performed twice for each target dsRNA. Data represent the mean±SEM of three biological replicates. The asterisks above the bar represent the significant difference between controls and treatments (One-way ANOVA, Tukey's test *P<0.05, **P<0.001, ****P<0.0001).

[0215] FIG. 3. Combinations of dsRNA improve RNAi-mediated control of whitefly. a-c, Percentage mortality of B. tabaci adults were fed on diet containing 75 ng/μl of single dsRNA or 150 ng/μl of mixture of two dsRNAs (75 ng/μl each dsRNA) targeting AChE1, v-ATPase A, and ZFP and mortality was recorded for 6 days. Sucrose and GFP dsRNA were used as negative controls. On day 6, combinations of dsRNAs AChE1 and v-ATPase A (a), AChE1 and ZFP (b), and v-ATPase A and ZFP (c) caused a significant whitefly mortality as compared to the respective single dsRNA. Each bioassay was repeated two times. d-i, Relative expression of target genes in adult B. tabaci post-feeding on diet containing single dsRNA or mixture of two dsRNAs targeting AChE1, v-ATPase A, and ZFP. Four days after feeding, RNA was extracted and used in qRT-PCR to determine relative mRNA levels. On day 4, the selected single dsRNA or mixture of dsRNAs AChE1 and v-ATPase A (d and e), AChE1 and ZFP (f and g), and v-ATPase A and ZFP (h and i) caused a significant gene silencing of the target gene in B. tabaci as compared to control GFP dsRNA. j, B. tabaci adults were fed on diet containing 100 ng/μl mixture of v-ATPase A and ZFP dsRNA (50 ng/μl each dsRNA) or stacked v-ATPase A and ZFP and mortality was recorded for 6 days. Sucrose and GFP dsRNA were used as negative controls. Stacking of two dsRNAs caused significantly higher whitefly mortality than a mixture of respective dsRNAs. k-l. Relative expression of target genes in adult B. tabaci post-feeding on diet containing mixture of two dsRNAs or stacked dsRNA targeting v-ATPase A and ZFP. Four day after feeding, RNA was extracted and used in qRT-PCR to determine relative mRNA levels. On day 4, stacked dsRNAs caused a significant target gene knockdown as compared to mixture of dsRNAs and control GFP dsRNA, whereas mixture of dsRNAs did not cause significant difference than control in B. tabaci.

[0216] FIG. 4. Loading profile dsRNA to LDH. Loading of dsRNA at the dsRNA-LDH (BioClay) mass ratios of 1:1, 1:2, 1:3, and 1:4, corresponding to lanes 2, 3, 4, and 5, respectively. M=1 kb+ ladder, dsRNA only (lane 1). The dsRNA loading includes in-vitro synthesized Cystein-Glycine dsRNA. As dsRNA completely loads onto the LDH, their mobility through the well is restricted, causing dsRNA to remain in the wells at the top of gel. Complete loading for dsRNA was achieved at a dsRNA-LDH mass ratio of 1:4 (lane 5).

[0217] FIG. 5. Topical application of BioClay (dsRNA-LDH) control developmental stages of whitefly. a, Percentage B. tabaci egg and nymph mortality caused by foliar spray of dsRNA-LDH (BioClay). Cotton plants at the two-leaf stage were sprayed with water, LDH, CMV2b dsRNA, naked target dsRNA and target dsRNA-LDH on day 1 and day 10 post eggs infestation (n=6 leaves per treatment group). Mortality of eggs and nymphs was counted on day 17 post spray. b-c, Percentage eggs and nymph mortality caused by mixing of sucrase-dsRNases2 dsRNA-LDH (b) and DUOX-dsRNase2-LDH (c) 17 days post spray. d, Images showing mortality of B. tabaci eggs and nymphs 17 days post LDH-dsRNA (BioClay) spray. Eggs and nymphs on water sprayed plants (a-d). Eggs hatching into nymphs (a); newly emerged nymph (b); and advanced nymphal stages (c-d). Mortality of eggs and nymphs on cotton plants sprayed with dsRNA-LDH (e-h). Unhatched eggs (e); dead newly emerged and advanced nymphs (f-h). e,f,g Percentage B. tabaci adult mortality caused by foliar spray of naked dsRNA and LDH-dsRNA (BioClay). Cotton plants at the two-leaf stage were sprayed with water, LDH, CMV2b dsRNA, naked target dsRNA and target dsRNA-LDH. Adult whiteflies (200 per treatment group) were released into clip cages post 1 day spray (n=6-8 leaves per treatment group). Mortality was recorded for 8 days. Bioassays were performed twice for each target dsRNA. (h) The reduction in target mRNA expression levels in adult whiteflies were analyzed 6 days after feeding on treated plants by RT-qPCR. The transcript expression levels were normalized using the reference gene rpl6 relative to the CMV2b control. The asterisks above the bar represent the significant difference between controls and treatments (One-way ANOVA, Tukey's test *P<0.05, ***P<0.001, ****P<0.0001). Data represent mean+s.e.m.

[0218] FIG. 6. RNAi-mediated silencing of Sucrase reduces honeydew secretion of adult whiteflies on cotton plants. Whiteflies fed on cotton plants sprayed with sucrase dsRNA and Sucrase-BioClay showed significant reduction in honeydew secretion as compared to the adults fed on control plants.

[0219] FIG. 7. Addition of penetrant can improve uptake of dsRNA in plants. Confocal imaging of adaxial surface of cotton leaves 24 h post treatment with and without penetrant after washing. Images are shown for Cy3 only; CMV2b-dsRNA-Cy3; CMV2b-dsRNA-Cy3-banjo penetrant; CMV2b-dsRNA-Cy3-pulse penetrant; and CMV2b-dsRNA-Cy3-supercharge elite penetrant. Bright-field (BF) images (column 1), Cy3 fluorescence images (column 2) and merged images (column 3) are shown. CMV2b-dsRNA with and without penetrant pipetted on adaxial surface of cotton leaves and sampled after 24 h incubation. The adaxial surface of leaves were rinsed with water by vigorous pipetting before being viewed under confocal microscope. showing the CMV2b-dsRNA with penetrant is transported deeper in the leaf as compared to the CMV2b-dsRNA without penetrant. Scale bar=100 μm. All leaves treated with either of the penetrant showed abundant uptake and deeper penetration of Cy3 into the spongy mesophyll and plants vascular bundle.

[0220] FIG. 8. Confocal image followed with Z-stack analysis show increased uptake of Cy3 fluorophore attached to CMV-2b dsRNA by the incorporation of penetrants. Confocal microscope z-stack projections showing the CMV2b-dsRNA with penetrant is transported abundantly into the plants vascular bundle as compared to the CMV2b-dsRNA without penetrant. Scale bar=100 μm.

[0221] FIG. 9. Translaminar movement of topically applied dsRNA in plants. Confocal imaging of abaxial surface of cotton leaves 24 h post treatment with and without penetrant. Images are shown for Cy3 only; CMV2b-dsRNA-Cy3; CMV2b-dsRNA-Cy3-banjo penetrant; CMV2b-dsRNA-Cy3-pulse penetrant; and CMV2b-dsRNA-Cy3-supercharge elite penetrant. Bright-field (BF) images (column 1), Cy3 fluorescence images (column 2) and merged images (column 3) are shown. CMV2b-dsRNA with and without penetrant pipetted on adaxial surface of cotton leaves and abaxial surface were viewed under confocal microscope. Confocal microscopy visualization shows that CMV2b-dsRNA without penetrant could not be detected from abaxial surface of leaf, whereas CMV2b-dsRNA with penetrant can still be detected. This confirms that penetrant can assist in the translaminar movement of dsRNA in the leaves. Scale bar=100 μm.

[0222] FIG. 10. Uptake of BioClay released dsRNA in plants vascular bundle. Confocal imaging of cotton leaves 72 h post treatment with naked dsRNA and BioClay. Images are shown for Cy3 only, CMV2b-dsRNA-Cy3 with and without penetrants (Banjo, Pulse, Supercharge Elite). Cy3-labelled naked dsRNA and LDH-dsRNA (BioClay) were applied on the cotton leaves and viewed under confocal microscope. The naked dsRNA and BioClay treated leaves showed uptake of dsRNA into the plants vascular bundle. Scale bar=100 μm.

[0223] FIG. 11. Uptake of clay released dsRNA into plants. Confocal imaging of cotton leaves 72 h post treatment with naked dsRNA and BioClay. Images are shown for Cy3 only, CMV2b-dsRNA-Cy3 with and without penetrants (Banjo, Pulse, Supercharge Elite). Cy3-labelled naked dsRNA and LDH-dsRNA (BioClay) were applied on the cotton leaves and viewed under confocal microscope. The naked dsRNA and BioClay treated leaves showed uptake of dsRNA into the spongy mesophyll. Scale bar=100 μm.

[0224] FIG. 12. Diet-mediated uptake of dsRNA in whitefly B. tabaci. Cy3-labelled GFP dsRNA was mixed with artificial diet (sucrose 30%) at a final concentration of 100 ng/μl and fed to adult whitefly for 24 h. Confocal microscopy of whole insect illustrates localization of Cy3-labelled GFP dsRNA in the abdomen of the whitefly. Control whiteflies fed on diet without Cy3-dsRNA did not show fluorescent signal. Bright-field (BF) image (column 1), Cy3 florescence image (column 2) and merged image of the two (column 3) are shown.

[0225] FIG. 13. Whitefly uptake dsRNA through artificial diet assay. Detection of fluorescently labelled GFP-dsRNA in adult whiteflies exposed to GFP dsRNA for 24 hours. Real time (qPCR results) followed with gel electrophoresis showing amplification of GFP-dsRNA in whiteflies fed on artificial diet enriched with GFP-dsRNA but not in sucrose only diets. Gel electrophoresis of the resultant qPCR products confirms the presence of dsRNA in the correct size range (approx. 300 bp).

[0226] FIG. 14. Leaf-mediated uptake of dsRNA in whitefly B. tabaci. Confocal microscopy of the whole insect indicates localization of Cy3 signal in the abdomen of the whitefly 48 hrs after feeding on the detached cotton leaf dipped in a fluorophore-labelled CMV 2b dsRNA solution. Control whiteflies fed on detached leaf dipped in a water as a negative control did not show fluorescent signal. Bright-field (BF) image (column 1), Cy3 florescence image (column 2) and merged image of the two (column 3) are shown.

[0227] FIG. 15. Whitefly uptake dsRNA through petiole dip assay. Uptake of Cy3-labeled CMV2b-dsRNA by adult whitefly B. tabaci. Northern blot analysis of the total RNA extracted from adult whiteflies fed on CMV-2b dsRNA through the detached cotton leaf for 48 hours confirms the presence of dsRNA band in the correct size range (approx. 300 bp).

[0228] FIG. 16. Plants-mediated uptake of dsRNA in whitefly B. tabaci. Cy3-labelled CMV 2b dsRNA with (a) and without penetrant (b) were pipetted on the abaxial or adaxial surface of the cotton leaf at a final concentration of 100 ng/μl and allowed to dry for 24 h. Adult whiteflies were released into the clip cage on the abaxial surface and allowed feeding for 48 h. Confocal microscopy of whole insect indicates localization of Cy3-labelled dsRNA in the abdomen of the whitefly, whereas control whiteflies fed on control (water) plant did not show fluorescent signal. Bright-field (BF) image (column 1), Cy3 florescence image (column 2) and merged image of the two (column 3) are shown.

[0229] FIG. 17. Whitefly uptake topically applied dsRNA via intact cotton plants. Combination of the 3D surface rendering of the reflective and the fluorescence mode clearly showing the presence of Cy3-labelled CMV 2b dsRNA inside the adult whitefly body.

### DETAILED DESCRIPTION

[0230] Before describing the present invention in detail, it is to be understood that the terminology used herein is for the purpose of describing particular embodiments only and is not intended to be limiting.

[0231] As used in this specification and the appended claims, the singular forms “a”, “an” and “the” include plural referents unless the content clearly dictates otherwise. Thus, for example, reference to “a binding partner” includes a combination of two or more such binding partners.

[0232] Throughout the description and claims of the specification, the word “comprise” and variations of the word, such as “comprising” and “comprises”, is not intended to exclude other additives, components, integers or steps.

[0233] Unless specifically defined otherwise, all technical and scientific terms used herein shall be taken to have the same meaning as commonly understood by one of ordinary skill in the art

[0234] All publications or patent applications or patents cited herein are entirely incorporated herein by reference.

[0235] A reference herein to a publication or patent application or patent or other matter which is given as prior art is not to be taken as admission that the document or matter (e.g., databases) was known or that the information it contains was part of the common general knowledge as at the priority date of any of the claims.

[0236] Methods and compositions are provided which employ one or more silencing elements that, when ingested by or contacted with an insect plant pest, such as Bemisia tabaci including, for example, Cassava whitefly, Cotton whitefly, Sliver-leaf whitefly, Sweet-potato whitefly, Tobacco whitefly; B. argentifolii Bellows & Perring; Dialeurodes citri Ashmead Trialeurodes abutiloneus, or T. vaporariorum Westwood plant pest, are capable of decreasing the level of one or more target sequences in the pest.

[0237] Disclosed herein are target genes as set forth in SEQ ID NOS 1-35. Silencing elements comprising sequences complementary to a RNA transcript of these sequences, or fragments or variants of these target genes are provided which, when ingested by or when contacting the pest, decrease the expression of one or more of the target sequences and thereby control the pest.

[0238] Also disclosed herein are target polynucleotides as set forth in SEQ ID NOS: 36-104, or variants and fragments thereof, and complements thereof. Silencing elements comprising sequences complementary to these sequences, or fragments or variants of these target polynucleotides are provided which, when ingested by or when contacting the pest, decrease the expression of one or more of the target sequences and thereby control the pest.

[0239] Also disclosed herein are target polynucleotides encoding proteins set forth in SEQ ID NO:105-138.

[0240] Also disclosed herein are silencing elements comprising polynucleotide sequences as set forth in SEQ ID NOS: 139-173, or fragments or variants of these sequences are provided which, when ingested by or when contacting the pest, decrease the expression of one or more of the target sequences and thereby control the pest.

[0241] In some embodiments, a formulation (e.g., a sprayable insecticide) comprising one or more polynucleotides encoding one or more silencing elements is provided which, when ingested by or when contacting the pest, decrease the level of one or more of the target sequences and thereby controls the pest.

[0242] In other embodiments, a transgenic plant comprising one or more polynucleotides encoding one or more silencing elements is provided which, when ingested by or when contacting the pest, decrease the level of one or more of the target sequences and thereby controls the pest.

[0243] In one embodiment, compositions and methods are provided which employ a silencing element comprising at least one double-stranded RNA region, at least one strand of which comprises a polynucleotide that is complementary to:
[0244] (a) a nucleotide sequence comprising a sequence of an RNA transcript expressed in an insect plant pest, or variants, isoforms and fragments of said nucleotide sequence, or complements of said nucleotide sequence;
[0245] (b) a nucleotide sequence comprising at least 70% sequence identity to said nucleotide sequence; or variants, isoforms and fragments of said nucleotide sequence, or complements of said nucleotide sequence; or
[0246] (c) a nucleotide sequence comprising at least 19 consecutive nucleotides of said nucleotide sequence; or variants, isoforms and fragments of said nucleotide sequence, or complements of said nucleotide sequence,
[0247] wherein the silencing element has insecticidal activity against an insect plant pest.

[0248] In some embodiments, the nucleotide sequence comprises a sequence that is complementary to an RNA transcript of one or more of the following target genes: BtGAP (Bta07742; Hunchback; SEQ ID NO:1), BtTreT (Bta13849; Solute carrier family 2, facilitated glucose transporter member 8; SEQ ID NO:2), BtCOPB1 (Bta11961; Coatomer subunit beta; SEQ ID NO:3), BtAlGluc (Bta07452; Alpha-glucosidase; SEQ ID NO:4), BtCHM4C (Bta01993; Charged multivesicular body protein 4C, putative; SEQ ID NO:5), BtATP synthase (Bta09165; ATP synthase subunit f, mitochondrial; SEQ ID NO:6), BtN2B (Bta20011; Putative ATPase N2B; SEQ ID NO:7), BtRieske (Bta11991; Cytochrome b-c1 complex subunit Rieske, mitochondrial; SEQ ID NO:8), BtaCMB7 (Bta09904; Charged multivesicular body protein 7; SEQ ID NO:9), BtaChorion (Bta13877; Chorion-specific transcription factor NO: 11), BtaEH (Bta11007; EH domain-containing protein 1; SEQ ID NO:12), BtaCleavage (Bta06507; Cleavage stimulation factor subunit 3; SEQ ID NO:13), BtaSyntax (Bta06944; Syntaxin binding protein-1,2,3; SEQ ID NO:14), BtaCd6 (Bta11395; cell division control protein 6 (Cdc6); SEQ ID NO:15), BtaMediator (Bta08552; Mediator of RNA polymerase II transcription subunit 17; SEQ ID NO:16), BtaATP binding (Bta10956; ATP-binding cassette; SEQ ID NO:17), BtaRRP42 (Bta03733; Exosome complex component RRP42; SEQ ID NO:18), BtaKappaB (Bta08258; Nuclear factor kappa-B-binding-like protein; SEQ ID NO:19), BtaATPaseAAA (Bta14342; ATPase family AAA domain-containing protein 1-B; SEQ ID NO: 20) BtarBAT (Bta07377; Neutral and basic amino acid transport protein rBAT; SEQ ID NO:21); BtAChE1 (Bta05381; Acetylcholinesterase 1; SEQ ID NO:22), BtTreH (Bta00329; Trehalase; SEQ ID NO:23), BtAqp1 (Bta01973; Aquaporin 1; SEQ ID NO: 24), Btv-ATPase A (Bta13958; V-type proton ATPase subunit a; SEQ ID NO: 25), BtZFP (Bta11919; Zinc finger protein; SEQ ID NO:26), BtGD (Bta02405; Glucose dehydrogenase; SEQ ID NO:27), BtMYO (Bta07326; Myosin regulatory light chain 2; SEQ ID NO:28), BtDUOX (Bta10996; Dual oxidase; SEQ ID NO:29), BtSUC (Bta14312; Sucrase; SEQ ID NO:30), BtaDyn (Bta02194; Dynactin subunit; SEQ ID NO: 31), BtaNucII (Bta06243; Deoxyribonuclease I (Nuclease II); SEQ ID NO:32), BtTryp_SPc (Bta03794; Trypsin-like serine protease; SEQ ID NO:33), BtPNLIPRP2 (Bta09442; Pancreatic lipase-related protein 2; SEQ ID NO:34), and BtaGTF (Bta07245, Glycosyl transferase; SEQ ID NO:35).

[0249] In other embodiments, the nucleotide sequence comprises a sequence that is complementary to an RNA transcript of one or more of the following target genes: BtGAP (Bta07742; Hunchback; SEQ ID NO:1), BtTreT (Bta13849; Solute carrier family 2, facilitated glucose transporter member 8; SEQ ID NO:2), BtCOPB1 (Bta11961; Coatomer subunit beta; SEQ ID NO:3), BtAlGluc (Bta07452; Alpha-glucosidase; SEQ ID NO:4), BtCHM4C (Bta01993; Charged multivesicular body protein 4C, putative; SEQ ID NO:5), BtATP synthase (Bta09165; ATP synthase subunit f, mitochondrial; SEQ ID NO:6), BtN2B (Bta20011; Putative ATPase N2B; SEQ ID NO:7), BtRieske (Bta11991; Cytochrome b-c1 complex subunit Rieske, mitochondrial; SEQ ID NO:8), BtaCMB7 (Bta09904; Charged multivesicular body protein 7; SEQ ID NO:9), BtaChorion (Bta13877; Chorion-specific transcription factor NO: 11), BtaEH (Bta11007; EH domain-containing protein 1; SEQ ID NO:12), BtaCleavage (Bta06507; Cleavage stimulation factor subunit 3; SEQ ID NO:13), BtaSyntax (Bta06944; Syntaxin binding protein-1,2,3; SEQ ID NO:14), BtaCd6 (Bta11395; cell division control protein 6 (Cdc6); SEQ ID NO:15), BtaMediator (Bta08552; Mediator of RNA polymerase II transcription subunit 17; SEQ ID NO:16), BtaATP binding (Bta10956; ATP-binding cassette; SEQ ID NO:17), BtaRRP42 (Bta03733; Exosome complex component RRP42; SEQ ID NO:18), BtaKappaB (Bta08258; Nuclear factor kappa-B-binding-like protein; SEQ ID NO:19), BtaATPaseAAA (Bta14342; ATPase family AAA domain-containing protein 1-B; SEQ ID NO: 20), and BtarBAT (Bta07377; Neutral and basic amino acid transport protein rBAT; SEQ ID NO:21); and BtaGTF (Bta07245, Glycosyl transferase; SEQ ID NO:35).

[0250] In further or alternative embodiments, the nucleotide sequence comprises a sequence that is complementary to an RNA transcript of one or more of the following target genes: BtAChE1 (Bta05381; Acetylcholinesterase 1; SEQ ID NO:22), BtTreH (Bta00329; Trehalase; SEQ ID NO:23), BtAqp1 (Bta01973; Aquaporin 1; SEQ ID NO: 24), Btv-ATPase A (Bta13958; V-type proton ATPase subunit a; SEQ ID NO: 25), BtZFP (Bta11919; Zinc finger protein; SEQ ID NO:26), BtGD (Bta02405; Glucose dehydrogenase; SEQ ID NO:27), BtMYO (Bta07326; Myosin regulatory light chain 2; SEQ ID NO:28), BtDUOX (Bta10996; Dual oxidase; SEQ ID NO:29), BtSUC (Bta14312; Sucrase; SEQ ID NO:30), BtaDyn (Bta02194; Dynactin subunit; SEQ ID NO: 31), and BtaNucII (Bta06243; Deoxyribonuclease I (Nuclease II); SEQ ID NO:32).

[0251] In further or alternative embodiments, the nucleotide sequence comprises a sequence that is complementary to an RNA transcript of one or both of the following target genes: BtTryp_SPc (Bta03794; Trypsin-like serine protease; SEQ ID NO:33), and BtPNLIPRP2 (Bta09442; Pancreatic lipase-related protein 2; SEQ ID NO:34).

[0252] In some embodiments, the nucleotide sequence comprises a sequence that is complementary to one or more of the following RNA transcripts: BtGAP (XM_019041638.1, Hunchback; SEQ ID NO:36), BtTreT (XM_019047819.1, Solute carrier family 2, facilitated glucose transporter member 8; SEQ ID NO:37), BtCOPB1 (XM_019045272.1; Coatomer subunit beta; SEQ ID NO:38), BtAlGluc (XM_019054927.1; Alpha-glucosidase; SEQ ID NO:39), BtCHM4C (XM_019050890.1; Charged multivesicular; body protein 4C, putative; SEQ ID NO: 40), BtATP synthase (XM_019060989.1; ATP synthase subunit f, mitochondrial; SEQ ID NO:41), BtN2B (XM_019043095.1; Putative ATPase N2B; SEQ ID NO:42), BtRieske (XM_019045249.1; Cytochrome b-c1 complex subunit Rieske, mitochondrial; SEQ ID NO:43), BtaCMB7 (XM_019043570.1; Charged multivesicular body protein 7; SEQ ID NO:44), BtaChorion (XM_019047862.1; Chorion-specific transcription factor GCMa, hybrid signal transduction histidine kinase D-like; SEQ ID NO: 45), BtaSurfeit (XM_019049766.1; Surfeit locus protein 4; SEQ ID NO:46), BtaEH (XM_019056878.1; EH domain-containing protein 1; SEQ ID NO:47), BtaCleavage (XM_019053966.1; Cleavage stimulation factor subunit 3, protein suppressor of forked; SEQ ID NO:48), BtaSyntax XM_019040883.1; Syntaxin binding protein-1,2,3, protein ROP; SEQ ID NO:49), BtaCd6 (XM_019044939.1; cell division control protein 6 (Cdc6); SEQ ID NO:50), BtaMediator (XM_019042377.1; Mediator of RNA polymerase II transcription subunit 17; SEQ ID NO:51), BtaATP binding (XM_019044610.1; ATP-binding cassette; SEQ ID NO:52), BtaRRP42 (XM_019061639.1; Exosome complex component RRP42; SEQ ID NO:53), BtaKappaB (XM_019041919.1; Nuclear factor kappa-B-binding-like protein; SEQ ID NO: 54), BtaATPaseAAA (XM_019058468.1; ATPase family AAA domain-containing protein 1-B; SEQ ID NO:55); BtarBAT (XM_019054773.1; Neutral and basic amino acid rBAT; SEQ ID NO:56); BtAChE1 (XM_019040189.1; Acetylcholinesterase 1; SEQ ID NO:57), BtTreH (XM_019049052.1; Trehalase; SEQ ID NO:58), BtAqp1 (XM_019051047.1; Aquaporin 1; SEQ ID NO:59), Btv-ATPase A (XM_019047962.1; V-type proton ATPase subunit a; SEQ ID NO:60); BIZFP (Bta11919; Zinc finger protein), BtGD (XM_019046154.1; Glucose dehydrogenase; SEQ ID NO:61), BtMYO (XM_019041179.1; Myosin regulatory light chain 2; SEQ ID NO:62), BtDUOX (XM_019056938.1; Dual oxidase; SEQ ID NO:63), BtSUC (XM_019048374.1; Sucrase; SEQ ID NO:64), BtaDyn (XM_019045200.1; Dynactin subunit; SEQ ID NO: 65), BtaNucII (XM_019053573.1; Deoxyribonuclease I; SEQ ID NO:66); BtTryp_SPc (XM_019061756.1; Trypsin-like serine protease, venom protease-like; SEQ ID NO:67), BtPNLIPRP2 (XM_019043265.1; Pancreatic lipase-related protein 2; SEQ ID NO:68), and BtaGTF (XM_019041198.1, Glycosyl transferase; SEQ ID NO: 69).

[0253] In other embodiments, the nucleotide sequence comprises a sequence that is complementary to one or more of the following RNA transcripts: BtGAP (XM_019041638.1, Hunchback; SEQ ID NO:36), BtTreT (XM_019047819.1, Solute carrier family 2, facilitated glucose transporter member 8; SEQ ID NO:37), BtCOPB1 (XM_019045272.1; Coatomer subunit beta; SEQ ID NO:38), BtAlGluc (XM_019054927.1; Alpha-glucosidase; SEQ ID NO:39), BtCHM4C (XM_019050890.1; Charged multivesicular body protein 4C, putative; SEQ ID NO: 40), BtATP synthase (XM_019060989.1; ATP synthase subunit f, mitochondrial; SEQ ID NO:41), BtN2B (XM_019043095.1; Putative ATPase N2B; SEQ ID NO:42), BtRieske (XM_019045249.1; Cytochrome b-c1 complex subunit Rieske, mitochondrial; SEQ ID NO:43), BtaCMB7 (XM_019043570.1; Charged multivesicular body protein 7; SEQ ID NO:44), BtaChorion (XM_019047862.1; Chorion-specific transcription factor GCMa; SEQ ID NO:45), BtaSurfeit (XM_019049766.1; Surfeit locus protein 4; SEQ ID NO:46), BtaEH (XM_019056878.1; EH domain-containing protein 1; SEQ ID NO:47), BtaCleavage (XM_019053966.1; Cleavage stimulation factor subunit 3; SEQ ID NO:48), BtaSyntax XM_019040883.1; Syntaxin binding protein-1,2,3; SEQ ID NO:49), BtaCd6 (XM_019044939.1; cell division control protein 6 (Cdc6); SEQ ID NO:50), BtaMediator (XM_019042377.1; Mediator of RNA polymerase II transcription subunit 17; SEQ ID NO:51), BtaATP binding (XM_019044610.1; ATP-binding cassette; SEQ ID NO:52), BtaRRP42 (XM_019061639.1; Exosome complex component RRP42; SEQ ID NO:53), BtaKappaB (XM_019041919.1; Nuclear factor kappa-B-binding-like protein; SEQ ID NO: 54), BtaATPaseAAA (XM_019058468.1; ATPase family AAA domain-containing protein 1-B; SEQ ID NO:55), and BtarBAT (XM_019054773.1; Neutral and basic amino acid transport protein rBAT; SEQ ID NO:56), and BtaGTF (XM_019041198.1, Glycosyl transferase; SEQ ID NO:69).

[0254] In further or alternative embodiments, the nucleotide sequence comprises a sequence that is complementary to one or more of the following RNA transcripts BtAChE1 (XM_019040189.1; Acetylcholinesterase 1; SEQ ID NO:57), BtTreH (XM_019049052.1; Trehalase; SEQ ID NO:58), BtAqp1 (XM_019051047.1; Aquaporin 1; SEQ ID NO:59), Btv-ATPase A (XM_019047962.1; V-type proton ATPase subunit a; SEQ ID NO:60); BIZFP (Zinc finger protein), BtGD (XM_019046154.1; Glucose dehydrogenase; SEQ ID NO:61), BtMYO (XM_019041179.1; Myosin regulatory light chain 2; SEQ ID NO:62), BtDUOX (XM_019056938.1; Dual oxidase; SEQ ID NO:63), BtSUC (XM_019048374.1; Sucrase; SEQ ID NO:64), BtaDyn (XM_019045200.1; Dynactin subunit; SEQ ID NO: 65), BtaNucII (XM_019053573.1; Deoxyribonuclease I (Nuclease II); SEQ ID NO: 66).

[0255] In further or alternative embodiments, the nucleotide sequence comprises a sequence that is complementary to one or both of the following RNA transcripts BtTryp_SPc (XM_019061756.1; Trypsin-like serine protease; SEQ ID NO:67) and BtPNLIPRP2 (XM_019043265.1; Pancreatic lipase-related protein 2; SEQ ID NO:68).

[0256] In other embodiments, the nucleotide sequence comprises a sequence that is complementary to one or more of the following RNA transcripts: BtGAP (Bta07742; Hunchback; SEQ ID NO:70), BtTreT (Bta13849; Solute carrier family 2, facilitated glucose transporter member 8; SEQ ID NO:71), BtCOPB1 (Bta11961; Coatomer subunit beta; SEQ ID NO:72), BtAlGluc (Bta07452; Alpha-glucosidase; SEQ ID NO: 73), BtCHM4C (Bta01993; Charged multivesicular body protein 4C, putative; SEQ ID NO: 74), BtATP synthase (Bta09165; ATP synthase subunit f, mitochondrial; SEQ ID NO: 75), BtN2B (Bta20011; Putative ATPase N2B; SEQ ID NO:76), BtRieske (Bta11991; Cytochrome b-c1 complex subunit Rieske, mitochondrial; SEQ ID NO:77), BtaCMB7 (Bta09904; Charged multivesicular body protein 7; SEQ ID NO:78), BtaChorion (Bta13877; Chorion-specific transcription factor GCMa; SEQ ID NO:79), BtaSurfeit (Bta01046; Surfeit locus protein 4; SEQ ID NO:80), BtaEH (Bta11007; EH domain-containing protein 1; SEQ ID NO:81), BtaCleavage (Bta06507; Cleavage stimulation factor subunit 3; SEQ ID NO:82), BtaSyntax (Bta06944; Syntaxin binding protein-1,2,3; SEQ ID NO:83), BtaCd6 (Bta11395; cell division control protein 6 (Cdc6); SEQ ID NO:84), BtaMediator (Bta08552; Mediator of RNA polymerase II transcription subunit 17; SEQ ID NO:85), BtaATP binding (Bta10956; ATP-binding cassette; SEQ ID NO:86), BtaRRP42 (Bta03733; Exosome complex component RRP42; SEQ ID NO:87), BtaKappaB (Bta08258; Nuclear factor kappa-B-binding-like protein; SEQ ID NO:88), BtaATPaseAAA (Bta14342; ATPase family AAA domain-containing protein 1-B; SEQ ID NO:89), BtarBAT (Bta07377; Neutral and basic amino acid transport protein rBAT; SEQ ID NO:90), BtAChE1 (Bta05381; Acetylcholinesterase 1; SEQ ID NO:91), BtTreH (Bta00329; Trehalase; SEQ ID NO: 92), BtAqp1 (Bta01973; Aquaporin 1; SEQ ID NO:93), Btv-ATPase A (Bta13958; V-type proton ATPase subunit a; SEQ ID NO:94); BIZFP (Bta11919; Zinc finger protein; SEQ ID NO:95), BtGD (Bta02405; Glucose dehydrogenase; SEQ ID NO:96), BtMYO (Bta07326; Myosin regulatory light chain 2; SEQ ID NO:97), BtDUOX (Bta10996; Dual oxidase; SEQ ID NO:98), BtSUC (Bta14312; Sucrase; SEQ ID NO: 99), BtaDyn (Bta02194; Dynactin subunit; SEQ ID NO:100), and BtaNucII (Bta06243; Deoxyribonuclease I (Nuclease II); SEQ ID NO:101), BtTryp_SPc (Bta03794; Trypsin-like serine protease; SEQ ID NO:102), BtPNLIPRP2 (Bta09442; Pancreatic lipase-related protein 2; SEQ ID NO:103), and BtaGTF (Bta07245; Glycosyl transferase; SEQ ID NO:104).

[0257] In other embodiments, the nucleotide sequence comprises a sequence that is complementary to one or more of the following RNA transcripts: BtGAP (Bta07742; Hunchback; SEQ ID NO:70), BtTreT (Bta13849; Solute carrier family 2, facilitated glucose transporter member 8; SEQ ID NO: 71), BtCOPB1 (Bta1 1961; Coatomer subunit beta; SEQ ID NO:72), BtAlGluc (Bta07452; Alpha-glucosidase; SEQ ID NO: 73), BtCHM4C (Bta01993; Charged multivesicular body protein 4C, putative; SEQ ID NO: 74), BtATP synthase (Bta09165; ATP synthase subunit f, mitochondrial; SEQ ID NO: 75), BtN2B (Bta20011; Putative ATPase N2B; SEQ ID NO:76), BtRieske (Bta11991; Cytochrome b-c1 complex subunit Rieske, mitochondrial; SEQ ID NO:77), BtaCMB7 (Bta09904; Charged multivesicular body protein 7; SEQ ID NO:78), BtaChorion (Bta13877; Chorion-specific transcription factor GCMa; SEQ ID NO:79), BtaSurfeit (Bta01046; Surfeit locus protein 4; SEQ ID NO:80), BtaEH (Bta11007; EH domain-containing protein 1; SEQ ID NO:81), BtaCleavage (Bta06507; Cleavage stimulation factor subunit 3; SEQ ID NO:82), BtaSyntax (Bta06944; Syntaxin binding protein-1,2,3; SEQ ID NO:83), BtaCd6 (Bta11395; cell division control protein 6 (Cdc6); SEQ ID NO:84), BtaMediator (Bta08552; Mediator of RNA polymerase II transcription subunit 17; SEQ ID NO:85), BtaATP binding (Bta10956; ATP-binding cassette; SEQ ID NO:86), BtaRRP42 (Bta03733; Exosome complex component RRP42; SEQ ID NO:87), BtaKappaB (Bta08258; Nuclear factor kappa-B-binding-like protein; SEQ ID NO:88), BtaATPaseAAA (Bta14342; ATPase family AAA domain-containing protein 1-B; SEQ ID NO:89); BtarBAT (Bta07377; Neutral and basic amino acid transport protein rBAT; SEQ ID NO:90), and BtaGTF (Bta07245; Glycosyl transferase; SEQ ID NO:104).

[0258] In further or alternative embodiments, the nucleotide sequence comprises a sequence that is complementary to one or more of the following RNA transcripts: BtAChE1 (Bta05381; Acetylcholinesterase 1; SEQ ID NO:91), BtTreH (Bta00329; Trehalase; SEQ ID NO:92), BtAqp1 (Bta01973; Aquaporin 1; SEQ ID NO:93), Btv-ATPase A (Bta13958; V-type proton ATPase subunit a; SEQ ID NO:94); BtZFP (Bta11919; Zinc finger protein; SEQ ID NO:95), BtGD (Bta02405; Glucose dehydrogenase; SEQ ID NO:96), BtMYO (Bta07326; Myosin regulatory light chain 2; SEQ ID NO:97), BtDUOX (Bta10996; Dual oxidase; SEQ ID NO:98), BtSUC (Bta14312; Sucrase; SEQ ID NO:99), BtaDyn (Bta02194; Dynactin subunit; SEQ ID NO: 100), and BtaNucII (Bta06243; Deoxyribonuclease I (Nuclease II); SEQ ID NO: 101).

[0259] In further or alternative embodiments, the nucleotide sequence comprises a sequence that is complementary to one or both of the following RNA transcripts: BtTryp_SPc (Bta03794; Trypsin-like serine protease; SEQ ID NO:102) and BtPNLIPRP2 (Bta09442; Pancreatic lipase-related protein 2; SEQ ID NO:103).

[0260] In some embodiments, the nucleotide sequence comprises a sequence that is complementary to an RNA transcript of one or more of the following target genes: BtGAP (Bta07742; Hunchback; SEQ ID NO:1), BtCOPB1 (Bta11961; Coatomer subunit beta; SEQ ID NO:3), BtCHM4C (Bta01993; Charged multivesicular body protein 4C, putative; SEQ ID NO:5), BtN2B (Bta20011; Putative ATPase N2B; SEQ ID NO:7), BtRieske (Bta11991; Cytochrome b-c1 complex subunit Rieske, mitochondrial; SEQ ID NO:8), BtaCMB7 (Bta09904; Charged multivesicular body protein 7; SEQ ID NO:9), BtaChorion (Bta13877; Chorion-specific transcription factor GCMa; SEQ ID NO:10), BtaSurfeit; (Bta01046; Surfeit locus protein 4; SEQ ID NO: 11), BtaEH (Bta11007; EH domain-containing protein 1; SEQ ID NO:12), BtaCleavage (Cleavage stimulation factor subunit 3; SEQ ID NO:13), BtaSyntax (Bta06944; Syntaxin binding protein-1,2,3; SEQ ID NOL14), BtaCd6 (Bta11395; Cdc6; SEQ ID NO:15), BtaMediator (Bta08552; Mediator of RNA polymerase II transcription subunit 17; SEQ ID NO:16), BtaATP binding (Bta10956; ATP-binding cassette; SEQ ID NO:17), BtaRRP42 (Bta03733; Exosome complex component RRP42; SEQ ID NO:18), BtaKappaB (Bta08258; Nuclear factor kappa-B-binding-like protein; SEQ ID NO:19), and BtaATPaseAAA (Bta14342; ATPase family AAA domain-containing protein 1-B; SEQ ID NO:20), BtZFP (Bta11919; Zinc finger protein; SEQ ID NO:26), BtGD (Bta02405; Glucose dehydrogenase; SEQ ID NO:27), BtMYO (Bta07326; Myosin regulatory light chain 2; SEQ ID NO:28), BtDUOX (Bta10996; Dual oxidase; SEQ ID NO:29), BtSUC (Bta14312; Sucrase; SEQ ID NO:30), BtaDyn (Bta02194; Dynactin subunit; SEQ ID NO:31), BtTryp_SPc (Bta03794; Trypsin-like serine protease; SEQ ID NO:33), and BtPNLIPRP2 (Bta09442; Pancreatic lipase-related protein 2; SEQ ID NO:34).

[0261] In some embodiments, the nucleotide sequence comprises a sequence that is complementary to one or more of the following RNA transcripts: BtGAP (XM_019041638.1; Hunchback; SEQ ID NO:36), BtCOPB1 (XM_019045272.1; Coatomer subunit beta; SEQ ID NO:38), BtCHM4C (XM_019050890.1; Charged multivesicular body protein 4C, putative; SEQ ID NO:40), BtN2B (XM_019043095.1; Putative ATPase N2B; SEQ ID NO:42), BtRieske (XM_019045249.1; Cytochrome b-c1 complex subunit Rieske, mitochondrial; SEQ ID NO:43), BtaCMB7 (XM_019043570.1; Charged multivesicular body protein 7; SEQ ID NO:44), BtaChorion (XM_019047862.1; Chorion-specific transcription factor GCMa; SEQ ID NO: 45), BtaSurfeit; (XM_019049766.1; Surfeit locus protein 4; SEQ ID NO:46), BtaEH (XM_019056878.1; EH domain-containing protein 1; SEQ ID NO:47), BtaCleavage (XM_019053966.1; Cleavage stimulation factor subunit 3; SEQ ID NO: 48), BtaSyntax (XM_019040883.1; Syntaxin binding protein-1,2,3; SEQ ID NO: 49), BtaCd6 (XM_019044939.1; Cdc6; SEQ ID NO:50), BtaMediator (XM_019042377.1; Mediator of RNA polymerase II transcription subunit 17; SEQ ID NO: 51), BtaATP binding (XM_019044610.1; ATP-binding cassette; SEQ ID NO:52), BtaRRP42 (XM_019061639.1; Exosome complex component RRP42; SEQ ID NO: 53), BtaKappaB (XM_019041919.1; Nuclear factor kappa-B-binding-like protein; SEQ ID NO:54), and BtaATPaseAAA (XM_019058468.1; ATPase family AAA domain-containing protein 1-B; SEQ ID NO:55), BIZFP (Zinc finger protein), BtGD (XM_019046154.1; Glucose dehydrogenase; SEQ ID NO:61), BtMYO (XM_019041179.1; Myosin regulatory light chain 2; SEQ ID NO:62), BtDUOX (XM_019056938.1; Dual oxidase; SEQ ID NO:63), BtSUC (XM_019048374.1; Sucrase; SEQ ID NO:64), BtaDyn (XM_019045200.1; Dynactin subunit; SEQ ID NO: 65), BtTryp_SPc (XM_019061756.1; Trypsin-like serine protease; SEQ ID NO: 67), BtPNLIPRP2 (XM_019043265.1; Pancreatic lipase-related protein 2; SEQ ID NO: 68).

[0262] In other embodiments, the nucleotide sequence comprises a sequence that is complementary to one or more of the following RNA transcripts: BtGAP (Bta07742; Hunchback; SEQ ID NO:70), BtCOPB1 (Bta11961; Coatomer subunit beta; SEQ ID NO: 72), BtCHM4C (Bta01993; Charged multivesicular body protein 4C, putative; SEQ ID NO: 74), BtN2B (Bta20011; Putative ATPase N2B; SEQ ID NO:76), BtRieske (Bta11991; Cytochrome b-c1 complex subunit Rieske, mitochondrial; SEQ ID NO:77), BtaCMB7 (Bta09904; Charged multivesicular body protein 7; SEQ ID NO:78), BtaChorion (Bta13877; Chorion-specific transcription factor GCMa; SEQ ID NO:79), BtaSurfeit (Bta01046; Surfeit locus protein 4; SEQ ID NO:80), BtaEH (Bta11007; EH domain-containing protein 1; SEQ ID NO:81), BtaCleavage (Bta06507; Cleavage stimulation factor subunit 3; SEQ ID NO:82), BtaSyntax (Bta06944; Syntaxin binding protein-1,2,3; SEQ ID NO:83), BtaCd6 (Bta11395; Cdc6; SEQ ID NO:84), BtaMediator (Bta08552; Mediator of RNA polymerase II transcription subunit 17; SEQ ID NO: 85), BtaATP binding (Bta10956; ATP-binding cassette; SEQ ID NO:86), BtaRRP42 (Bta03733; Exosome complex component RRP42; SEQ ID NO:87), BtaKappaB (Bta08258; Nuclear factor kappa-B-binding-like protein; SEQ ID NO:88), and BtaATPaseAAA (Bta14342; ATPase family AAA domain-containing protein 1-B; SEQ ID NO:89), BtZFP (Zinc finger protein), BtGD (Bta02405; Glucose dehydrogenase; SEQ ID NO:96), BtMYO (Bta07326; Myosin regulatory light chain 2; SEQ ID NO:97), BtDUOX (Bta10996; Dual oxidase; SEQ ID NO:98), BtSUC (Bta14312; Sucrase; SEQ ID NO:99), BtaDyn (Bta02194; Dynactin subunit; SEQ ID NO: 100), BtTryp_SPc (Bta03794; Trypsin-like serine protease; SEQ ID NO:102), BtPNLIPRP2 (Bta09442; Pancreatic lipase-related protein 2; SEQ ID NO:103).

[0263] In another embodiment, compositions and methods are provided which employ one or more silencing elements which target a polynucleotide encoding one or more of the following proteins: Hunchback (XP_018897183.1; SEQ ID NO:105), Solute carrier family 2, facilitated glucose transporter member 8 (XP_018903364.1; SEQ ID NO:106), Coatomer subunit beta (XP_018900817.1; SEQ ID NO:107), Alpha-glucosidase (XP_018900817.1; SEQ ID NO:108), Charged multivesicular body protein 4C, putative (XP_018906435.1; SEQ ID NO:109), ATP synthase subunit f, mitochondrial (XP_018916534.1; SEQ ID NO:110), Putative ATPase N2B (XP_018898640.1; SEQ ID NO:111), Cytochrome b-c1 complex subunit Rieske, mitochondrial (XP_018900794.1; SEQ ID NO:112), Charged multivesicular body protein 7 (XP_018899115.1; SEQ ID NO:113), Chorion-specific transcription factor GCMa (XP_018903407.1; SEQ ID NO:114), Surfeit locus protein 4 (XP_018905311.1; SEQ ID NO:115), EH domain-containing protein 1 (XP_018912423.1; SEQ ID NO:116), Cleavage stimulation factor subunit 3 (XP_018909511.1; SEQ ID NO:117), Syntaxin binding protein-1,2,3 (XP_018896428.1; SEQ ID NO:118), Cdc6 (XP_018900484.1; SEQ ID NO:119), Mediator of RNA polymerase II transcription subunit 17 (XP_018897922.1; SEQ ID NO: 120), ATP-binding cassette (XP_018900155.1; SEQ ID NO:121), Exosome complex component RRP42 (XP_018917184.1; SEQ ID NO:122), Nuclear factor kappa-B-binding-like protein (XP_018897464.1; SEQ ID NO:123), ATPase family AAA domain-containing protein 1-B (XP_018914013.1; SEQ ID NO:124), Neutral and basic amino acid transport protein rBAT (XP_018910318.1; SEQ ID NO:125), Acetylcholinesterase 1 (XP_018895734.1; SEQ ID NO:126), Trehalase (XP_018904597.1; SEQ ID NO:127), Aquaporin 1 (XP_018906592.1; SEQ ID NO: 128), V-type proton ATPase subunit a (XP_018903507.1; SEQ ID NO:129), Zinc finger protein; Glucose dehydrogenase (XP_018901699.1; SEQ ID NO:130), Myosin regulatory light chain 2 (XP_018896724.1; SEQ ID NO:131), Dual oxidase (XP_018912483.1; SEQ ID NO:132), Sucrase (XP_018903919.1; SEQ ID NO:133), Dynactin subunit (XP_018900745.1; SEQ ID NO:134), Deoxyribonuclease I (Nuclease II) (XP_018909118.1; SEQ ID NO:135), Trypsin-like serine protease (XP_018917301.1; SEQ ID NO:136), Pancreatic lipase-related protein 2 (XP_018898810.1; SEQ ID NO:137), and Glycosyl transferase (XP_018896743.1; SEQ ID NO:138).

[0264] In another embodiment, compositions and methods are provided which employ one or more silencing elements which target a polynucleotide encoding one or more of the following proteins: Hunchback (XP_018897183.1; SEQ ID NO:105), Solute carrier family 2, facilitated glucose transporter member 8 (XP_018903364.1; SEQ ID NO:106), Coatomer subunit beta (XP_018900817.1; SEQ ID NO:107), Alpha-glucosidase (XP_018900817.1; SEQ ID NO:108), Charged multivesicular; body protein 4C, putative (XP_018906435.1; SEQ ID NO:109), ATP synthase subunit f, mitochondrial (XP_018916534.1; SEQ ID NO:110), Putative ATPase N2B (XP_018898640.1; SEQ ID NO:111), Cytochrome b-c1 complex subunit Rieske, mitochondrial (XP_018900794.1; SEQ ID NO:112), Charged multivesicular body protein 7 (XP_018899115.1; SEQ ID NO:113), Chorion-specific transcription factor GCMa (XP_018903407.1; SEQ ID NO:114), Surfeit locus protein 4 (XP_018905311.1; SEQ ID NO:115), EH domain-containing protein 1 (XP_018912423.1; SEQ ID NO:116), Cleavage stimulation factor subunit 3 (XP_018909511.1; SEQ ID NO:117), Syntaxin binding protein-1,2,3 (XP_018896428.1; SEQ ID NO:118), Cdc6 (XP_018900484.1; SEQ ID NO:119), Mediator of RNA polymerase II transcription subunit 17 (XP_018897922.1; SEQ ID NO: 120), ATP-binding cassette (XP_018900155.1; SEQ ID NO:121), Exosome complex component RRP42 (XP_018917184.1; SEQ ID NO:122), Nuclear factor kappa-B-binding-like protein (XP_018897464.1; SEQ ID NO:123), ATPase family AAA domain-containing protein 1-B (XP_018914013.1; SEQ ID NO:124), Neutral and basic amino acid transport protein rBAT (XP_018910318.1; SEQ ID NO:125), and Glycosyl transferase (XP_018896743.1; SEQ ID NO:138).

[0265] In further or alternative embodiments, compositions and methods are provided which employ one or more silencing elements which target a polynucleotide encoding one or more of the following proteins: Acetylcholinesterase 1 (XP_018895734.1; SEQ ID NO:126), Trehalase (XP_018904597.1; SEQ ID NO:127), Aquaporin 1 (XP_018906592.1; SEQ ID NO:128), V-type proton ATPase subunit a (XP_018903507.1; SEQ ID NO:129), Zinc finger protein; Glucose dehydrogenase (XP_018901699.1; SEQ ID NO:130), Myosin regulatory light chain 2 (XP_018896724.1; SEQ ID NO:131), Dual oxidase (XP_018912483.1; SEQ ID NO: 132); Sucrase (XP_018903919.1; SEQ ID NO:133), Dynactin subunit (XP_018900745.1; SEQ ID NO:134), and Deoxyribonuclease I (Nuclease II) (XP_018909118.1; SEQ ID NO:135).

[0266] In further or alternative embodiments, compositions and methods are provided which employ one or more silencing elements which target a polynucleotide encoding one or both of the following proteins: Trypsin-like serine protease (XP_018917301.1; SEQ ID NO:136) and Pancreatic lipase-related protein 2 (XP_018898810.1; SEQ ID NO:137).

[0267] In some embodiments, compositions and methods are provided which employ one or more silencing elements which target a polynucleotide encoding one or more of the following proteins: Hunchback (XP_018897183.1; SEQ ID NO:105), Coatomer subunit beta (XP_018900817.1; SEQ ID NO:107), Charged multivesicular body protein 4C, putative (XP_018906435.1; SEQ ID NO:109), Putative ATPase N2B (XP_018898640.1; SEQ ID NO:111), Cytochrome b-c1 complex subunit Rieske, mitochondrial (XP_018900794.1; SEQ ID NO:112), Charged multivesicular body protein 7 (XP_018899115.1; SEQ ID NO:113), Chorion-specific transcription factor GCMa (XP_018903407.1; SEQ ID NO:114), Surfeit locus protein 4 (XP_018905311.1; SEQ ID NO:115), EH domain-containing protein 1 (XP_018912423.1; SEQ ID NO:116), Cleavage stimulation factor subunit 3 (XP_018909511.1; SEQ ID NO:117), Syntaxin binding protein-1,2,3 (XP_018896428.1; SEQ ID NO:118), Cdc6 (XP_018900484.1; SEQ ID NO:119), Mediator of RNA polymerase II transcription subunit 17 (XP_018897922.1; SEQ ID NO: 120), ATP-binding cassette (XM_019044610.1; SEQ ID NO:121), Exosome complex component RRP42 (XM_019061639.1; SEQ ID NO:122), Nuclear factor kappa-B-binding-like protein (XM_019041921.1; SEQ ID NO:123); ATPase family AAA domain-containing protein 1-B (XP_018914013.1; SEQ ID NO:124), Zinc finger protein; Glucose dehydrogenase (XP_018901699.1; SEQ ID NO:130), Myosin regulatory light chain 2 (XP_018896724.1; SEQ ID NO:131), Dual oxidase; Sucrase (XP_018912483.1; SEQ ID NO:132), Dynactin subunit (XP_018900745.1; SEQ ID NO: 134), Trypsin-like serine protease (XP_018917301.1; SEQ ID NO:136), and Pancreatic lipase-related protein 2 (XP_018898810.1; SEQ ID NO:137).

[0268] In one embodiment, compositions and methods are provided which employ a silencing element comprising at least one double-stranded RNA region, at least one strand of which comprises a nucleotide sequence comprising any one of SEQ ID NOS: 139-173; or variants and fragments thereof, and complements thereof. Variants and fragments also encode biologically active silencing elements (e.g., insecticidal dsRNAs). The variants may comprise one or more mutations and/or modifications that may for example, confer improved or altered properties on the dsRNAs.

[0269] In another embodiment, compositions and methods are provided which employ expression constructs, for example, DNA constructs, or vectors, for example, viral vectors, encoding one or more silencing elements, which when ingested by or contacted with the pest, decrease the level of one or more of the target polynucleotides, and thereby control the pest.

[0270] In another embodiment, plants, plant parts, seed, plant cells, and other host cells or organisms comprising the expression constructs, for example, DNA constructs, or vectors, for example, viral vectors, encoding the silencing elements or an active variant or fragment thereof are also provided.

[0271] The term “nucleic acid sequence” or “nucleic acid molecule” or polynucleotide are used interchangeably and refer to a DNA or RNA molecule in single or double stranded form.

[0272] The term “messenger RNA” or “mRNA” refers to RNA that is transcribed from genomic DNA and that carries the coding sequence for protein synthesis. Pre-mRNA (precursor mRNA) is transcribed from genomic DNA. In eukaryotes, pre-mRNA is processed into mRNA, which includes removal of the introns, i.e., “splicing”, and modifications to 5′ and 3′ end (e.g., polyadenylation). mRNA typically comprises from 5′ to 3′; a 5′cap (modified guanine nucleotide), 5′ UTR (untranslated region), the coding sequence (beginning with a start codon and ending with a stop codon), 3′ UTR, and the poly(A) tail.

[0273] As used herein, the terms “precursor mRNA” or “pre-mRNA” refer to an immature single strand of messenger ribonucleic acid (mRNA) that contains one or more intervening sequence(s) (introns). Pre-mRNA is transcribed by an RNA polymerase from a DNA template in the cell nucleus and is comprised of alternating sequences of introns and coding regions (exons). Once a pre-mRNA has been completely processed by the splicing out of introns and joining of exons, it is referred to as “messenger RNA” or “mRNA,” which is an RNA that is comprised exclusively of exons. Eukaryotic pre-mRNAs exist only transiently before being fully processed into mRNA. When a pre-mRNA has been processed to an mRNA sequence, it is exported out of the nucleus and eventually translated into a protein by ribosomes in the cytoplasm.

[0274] The term “intron” refers to a portion of a gene that is not translated into protein and while present in genomic DNA and pre-mRNA, it is removed in the formation of mature mRNA.

[0275] The term “exon” refers to a portion of a gene that is present in the mature form of mRNA. Exons include the ORF (open reading frame), i.e., the sequence which encodes protein, as well as 5′ and 3′ UTRs (untranslated regions). The UTRs are important for translation of the protein. Algorithms and computer programs are available for predicting exons in DNA sequences and for determining exon-intron junctions).

[0276] As used herein, “target mRNA” refers to the nucleic acid molecule to which the silencing elements provided herein are designed to hybridize. In the context of the present disclosure, target mRNA is usually mature mRNA.

[0277] As used herein, “hybridization” means the pairing of complementary strands of polynucleotides. In the context of the present disclosure, a polynucleotide is specifically hybridizable when there is a sufficient degree of complementarity to avoid non-specific binding of the polynucleotide to non-target nucleic acid sequences. One of skill in the art will be able to determine when a polynucleotide is specifically hybridizable.

[0278] As used herein, “complementary” refers to a nucleic acid molecule that can form hydrogen bond(s) with another nucleic acid molecule by either traditional Watson-Crick base pairing or other non-traditional types of pairing (e.g., Hoogsteen or reversed Hoogsteen hydrogen bonding) between complementary nucleosides or nucleotides. “Complementary” (or “specifically hybridizable”) indicates a sufficient degree of complementarity or precise pairing such that stable and specific binding occurs between a silencing element and a pre-mRNA or mRNA target. It is understood in the art that a nucleic acid molecule need not be 100% complementary to a target nucleic acid sequence to be specifically hybridizable. Complementarity is indicated by a percentage of residues in a nucleic acid molecule that can form hydrogen bonds with a second nucleic acid molecule.

[0279] Percent complementarity of a silencing element with a region of a target nucleic acid can be determined routinely using BLAST programs (basic local alignment search tools) and PowerBLAST programs known in the art (Altschul et al., J. Mol. Biol., 1990, 215, 403-410; Zhang and Madden, Genome Res., 1997, 7, 649-656). Percent homology, sequence identity or complementarity, can be determined by, for example, the Gap program (Wisconsin Sequence Analysis Package, Version 8 for Unix, Genetics Computer Group, University Research Park, Madison Wis.), using default settings, which uses the algorithm of Smith and Waterman (Adv. Appl. Math., 1981, 2, 482-489). Nucleic acid molecules that are “fully complementary” refers to those in which all the residues of a first nucleic acid molecule will hydrogen bond with the same number of contiguous residues in a second nucleic acid molecule, wherein the nucleic acid molecules either both have the same number of nucleotides (i.e., have the same length) or the two molecules have different lengths.

[0280] “Sequence identity” and “sequence similarity” can be determined by alignment of two nucleotide sequences using global or local alignment algorithms. Sequences may then be referred to as “substantially identical” or “essentially similar” when they are optimally aligned by for example the programs GAP or BESTFIT or the Emboss program “Needle” (using default parameters, see below) share at least a certain minimal percentage of sequence identity (as defined further below). These programs use the Needleman and Wunsch global alignment algorithm to align two sequences over their entire length, maximising the number of matches and minimises the number of gaps. Generally, the default parameters are used, with a gap creation penalty=10 and gap extension penalty=0.5 (both for nucleotide and protein alignments). For nucleotides the default scoring matrix used is DNAFULL (Henikoff & Henikoff, 1992, PNAS 89, 10915-10919). Sequence alignments and scores for percentage sequence identity may for example be determined using computer programs, such as EMBOSS (http://www.ebi.ac.uk/Tools/psa/emboss_needle/). Alternatively sequence similarity or identity may be determined by searching against databases such as FASTA, BLAST, etc., but hits should be retrieved and aligned pairwise to compare sequence identity. Two nucleic acid sequences have “substantial sequence identity” if the percentage sequence identity is at least 70%, 75%, 80%, 85%, 90%, 95%, 98%, 99% or more, preferably 90%, 95%, 98%, 99% or more (as determined by, for example, Emboss “needle” using default parameters, i.e. gap creation penalty=10, gap extension penalty=0.5, using scoring matrix DNAFULL for nucleic acids). Such sequences are also referred to as ‘variants’ herein. It should be understood that sequences with substantial sequence identity do not necessarily have the same length and may differ in length. For example, sequences that have the same nucleotide sequence but have additional nucleotides on 3′- and/or 5′-side are 100% identical.

[0281] A “fragment” of a polynucleotide refers to any subset of the molecule, i.e., a shorter polynucleotide.

[0282] A “variant” refers to a molecule substantially similar to the polynucleotide, such as a nucleotide substitution variant having one or more substituted nucleotides, but which maintains the ability to hybridize with the target sequence. Variants also include longer sequences.

[0283] As used herein, by “controlling a plant insect pest” or “controls a plant insect pest” is intended any effect on a plant insect pest that results in limiting the damage that the pest causes. Controlling a plant insect pest includes, but is not limited to, killing the pest, inhibiting development of the pest, altering fertility or growth of the pest in such a manner that the pest provides less damage to the plant, or in a manner for decreasing the number of offspring produced, producing less fit pests, including offspring, producing pests more susceptible to predator attack, producing pests more susceptible to other insecticides, decreasing pathogen (e.g., viral) transmission, or deterring the pests from eating the plant.

[0284] Reducing the level of the target polynucleotide or the polypeptide encoded thereby, in the pest results in suppression, control, and/or killing the pest. In one embodiment, reducing the level of the target sequence of the pest will reduce the pest damage by at least about 2% to at least about 6%, at least about 5% to about 50%, at least about 10% to about 60%, at least about 30% to about 70%, at least about 40% to about 80%, or at least about 50% to about 90% or greater. Hence, methods disclosed herein can be utilized to control pests, including but not limited to Bemisia tabaci; B. argentifolii Bellows & Perring; Dialeurodes citri Ashmead Trialeurodes abutiloneus, or T. vaporariorum Westwood plant pests.

[0285] Certain assays measuring the control of an insect plant pest are commonly known in the art, for example, artificial diet assay, detached leaf or petiole dip assay, vegetable soaking, foliar spray.

[0286] Disclosed herein are compositions and methods for protecting plants from an insect plant pest, or inducing resistance in a plant to an insect plant pest, such as Bemisia tabaci; B. argentifolii Bellows & Perring; Dialeurodes citri Ashmead Trialeurodes abutiloneus, or T. vaporariorum Westwood plant pest, are capable of decreasing the expression of a target sequence in the pest. In some embodiments, the insect plant pest is Bemisia tabaci of the order Hemiptera. There are currently 37 recognized Bemisia tabaci cryptic species (see, https:/www.nature.com/articles/s41598-019-42793-8). In one embodiment, the insect plant pest is Bemisia tabaci MEAM-1 or Biotype B.

### Target Sequences

[0287] As used herein, a “target sequence” or “target polynucleotide” comprises any sequence, partial or full-length, of a gene in the pest that one desires to reduce the level of expression thereof. In certain embodiments, decreasing the level of the target sequence (e.g., mRNA sequence) in the pest controls the pest. For example, the target sequence may be essential for growth and development. Non-limiting examples of target sequences include a polynucleotide comprising any one of SEQ ID NOS: 36-104, or variants and fragments of said nucleotide sequence, or complements of said nucleotide sequence. As exemplified elsewhere herein, decreasing the level of one or more of these target sequences in a Bemisia tabaci plant pest controls the pest. In one embodiment, a target sequence encodes a protein necessary for insect fitness and may be involved in sugar metabolism and/or excretion, ion transport, growth or development. In preferred embodiments, the target sequence is mRNA or pre-mRNA.

### Silencing Elements

[0288] As used herein, a “silencing element” is a polynucleotide which when ingested by or contacted with a plant insect pest, is capable of reducing the level of a target polynucleotide or the polypeptide encoded thereby to suppress, control, and/or kill the pest. Accordingly, it is to be understood that “silencing element” as used herein, comprises polynucleotides such as RNA constructs, double stranded RNA (dsRNA), hairpin RNA, siRNA, miRNA, amiRNA, and antisense RNA.

[0289] In preferred embodiments, the silencing element has insecticidal activity. By “insecticidal activity” it is meant that the silencing element supresses, controls, and/or kills the pest. In some embodiments, the pest mortality rate of the silencing element is at least about 10%, at least about 15%, at least about 20%, at least about 25%, at least about 30%, at least about 35%, at least about 40%, at least about 50%, at least about 55%, at least about 60%, at least about 70%, at least about 80%. The pest mortality rate may refer to the mortality rate or one or more of adult pests, nymph or eggs.

[0290] The silencing element employed can reduce the level of the target sequence by influencing the level of the target RNA transcript or, alternatively, by influencing translation and thereby affecting the level of the encoded polypeptide. Methods to assay for functional silencing elements that are capable of reducing the level of a target sequence are disclosed elsewhere herein.

[0291] A single polynucleotide employed in the disclosed methods can comprise one or more silencing elements to the same or different target polynucleotides. The silencing element can be produced in vivo (e.g., in a host such as a plant or microorganism) or in vitro (e.g., in a host cell or cell free expression system).

[0292] In certain embodiments, a silencing element may be chimeric comprising two or more disclosed sequences or fragments thereof. For example, the chimera may be a dsRNA as disclosed herein. In one embodiment, the chimera comprises two complementary sequences disclosed herein, or fragments thereof, having some degree of mismatch between the complementary sequences such that the two sequences are not perfect complements of one another. Providing at least two different sequences in a single silencing element may allow for targeting multiple genes using one silencing element and/or for example, one expression cassette. Targeting multiple genes may allow for slowing or reducing the possibility of resistance by the pest. In addition, providing multiple targeting ability in one expressed molecule may reduce the expression burden of the transformed plant or plant product, or provide topical treatments that are capable of targeting multiple pests with one application.

[0293] The silencing element can comprise additional sequences that advantageously effect transcription and/or the stability of a resulting transcript. As discussed in further detail below, enhancer suppressor elements can also be employed in conjunction with the silencing elements disclosed herein.

[0294] In certain embodiments, while the silencing element supresses, controls or kills pests, preferably the silencing element has no effect on the plant or plant part.

[0295] As used herein “reduces” or “reducing” the level of a polynucleotide or a polypeptide encoded thereby is intended to mean, the polynucleotide or polypeptide level of the target sequence is statistically lower than the polynucleotide level or polypeptide level of the same target sequence in an appropriate control pest which is not exposed to (i.e., has not ingested or come into contact with) the silencing element. In particular embodiments, methods and/or compositions disclosed herein reduce the polynucleotide level and/or the polypeptide level of the target sequence in a plant insect pest to less than 95%, less than 90%, less than 80%, less than 70%, less than 60%, less than 50%, less than 40%, less than 30%, less than 20%, less than 10%, or less than 5% of the polynucleotide level, or the level of the polypeptide encoded thereby, of the same target sequence in an appropriate control pest.

[0296] In some embodiments, a silencing element has substantial sequence identity to the target polynucleotide, typically greater than about 65% sequence identity, greater than about 70% sequence identity, greater than about 80% sequence identity, greater than about 85% sequence identity, about 90%, 91%, 92%, 93%, 94%, 95%, 96%, 97%, 98%, or 99% sequence identity. Furthermore, a silencing element can be complementary to a part of the target polynucleotide. Generally, target sequences of at least 15, 16, 17, 18, 19, 20, 22, 25, 50, 100, 200, 300, 400, 450 continuous nucleotides or greater of the sequence of any of SEQ ID NOS: 36-104, or variants, isoforms or fragments thereof, or complements thereof may be used. In some embodiments, the target sequence is at least 15, 16, 17, 18, 19, 20, 22, 25, 50, 100, 200 continuous nucleotides or greater of the sequence of any of SEQ ID NOS: 139-173, or variants, isoforms or fragments thereof, or complements thereof. Methods to assay for the level of the RNA transcript, the level of the encoded polypeptide, or the activity of the polynucleotide or polypeptide are well known and discussed elsewhere herein.

[0297] Any region of the target sequence can be used to design the silencing element. For example, the silencing element may be designed to share sequence identity to 5′ untranslated region of the target sequence(s), 3′ untranslated region of the target sequence(s), exonic regions of the target sequence(s), and any combination thereof.

[0298] In certain embodiments, the silencing element shares sufficient identity, homology, or is complementary to at least about 15, 16, 17, 18, 19, 20, 22, 25 or 30 consecutive nucleotides from about nucleotides 1-50, 25-75, 75-125, 50-100, 125-175, 175-225, 100-150, 150-200, 200-250, 225-275, 275-325, 250-300, 325-375, 375-425, 300-350, 350-400, 425-475, 400-450, 475-525, 450-500, 525-575, 575-625, 550-600, 625-675, 675-725, 600-650, 625-675, 675-725, 650-700, 725-825, 825-875, 750-800, 875-925, 925-975, 850-900, 925-975, 975-1025, 950-1000, 1000-1050, 1025-1075, 1075-1125, 1050-1100, 1125-1175, 1100-1200, 1175-1225, 1225-1275, 1200-1300, 1325-1375, 1375-1425, 1300-1400, 1425-1475, 1475-1525, 1400-1500, 1525-1575, 1575-1625, 1625-1675, 1675-1725, 1725-1775, 1775-1825, 1825-1875, 1875-1925, 1925-1975, 1975-2025, 2025-2075, 2075-2125, 2125-2175, 2175-2225, 1500-1600, 1600-1700, 1700-1800, 1800-1900, 1900-2000 of the target sequence.

### Antisense Silencing Elements

[0299] As used herein, an “antisense silencing element” comprises a polynucleotide complementary to all or part of the target RNA transcript in the “antisense orientation”. Expression of the antisense silencing element reduces the level of the target polynucleotide or the polypeptide encoded thereby. The polynucleotide comprising the antisense silencing element may correspond to all or part of the complement of the sequence encoding the target polynucleotide, all or part of the complement of 5′ and/or 3′ untranslated region of the target polynucleotide, all or part of the complement of the coding sequence of the target polynucleotide, or all or part of the complement of both the coding sequence and the untranslated regions of the target polynucleotide.

[0300] Typically, an antisense silencing element has substantial sequence identity to the complement of the target sequence, typically greater than about 65% sequence identity, greater than about 70% sequence identity, greater than about 80% sequence identity, greater than about 85% sequence identity, about 90%, 91%, 92%, 93%, 94%, 95%, 96%, 97%, 98%, or 99% sequence identity. The antisense silencing element may be fully complementary (i.e., 100% identical) to the complement of the target sequence.

[0301] The antisense silencing element can be any length so long as it reduces the level of the target sequence. The antisense silencing element can be, for example, at least 15, 16, 17, 18, 19, 20, 22, 25, 30, 50, 100, 150, 200, 250, 300, 350, 400, 450, 500, 600, 700, 900, 1000, 1100, 1200, 1200, 1300, 1500, 1600, 1700, 1800 nucleotides of the complement of the target sequence of any of SEQ ID NOS: 36-104, or variants or fragments thereof, or complements thereof. In other embodiments, the antisense silencing element can be, for example, about 15-25, 19-35, 19-50, 25-100, 100-150, 150-200, 200-250, 250-300, 300-350, 350-400, 450-500, 500-550, 550-600, 600-650, 650-700, 700-750, 750-800, 800-850, 850-900, 900-950, 950-1000, 1000-1050, 1050-1100, 1100-1200, 1200-1300, 1300-1400, 1400-1500, 1500-1600, 1600-1700, 1700-1800 nucleotides or longer of the complement of the target polynucleotides of any of SEQ ID NOS: 36-104, or variants or fragments thereof, or complements thereof.

### Double Stranded RNA Silencing Element

[0302] A “double stranded RNA silencing element” or “dsRNA silencing element” comprises at least one transcript that is capable of forming a dsRNA either before or after ingestion or internalisation by a plant insect pest. Thus, a “dsRNA silencing element” includes a dsRNA, a transcript or polyribonucleotide capable of forming a dsRNA or more than one transcript or polyribonucleotide capable of forming a dsRNA.

[0303] “Double stranded RNA” or “dsRNA” refers to a polyribonucleotide structure formed either by a single self-complementary (or partially complementary) RNA molecule or a polyribonucleotide structure formed by the expression of at least two distinct RNA strands. The dsRNA molecule(s) employed in the disclosed methods and compositions mediate the reduction of expression of a target sequence, for example, by mediating RNA interference “RNAi” or gene silencing in a sequence-specific manner. In various embodiments, the dsRNA is capable of reducing the level of a target polynucleotide or the polypeptide encoded thereby in an insect plant pest.

[0304] The dsRNA can reduce the level of the target sequence by influencing the level of the target RNA transcript, by influencing translation and thereby affecting the level of the encoded polypeptide, or by influencing expression at the pre-transcriptional level (i.e., via the modulation of chromatin structure, methylation pattern, etc., to alter gene expression). For example, see Verdel et al. (2004) Science 303:672-676; Pal-Bhadra et al. (2004) Science 303:669-672; Allshire (2002) Science 297:1818-1819; Volpe et al. (2002) Science 297:1833-1837; Jenuwein (2002) Science 297:2215-2218; and Hall et al. (2002) Science 297:2232-2237. Methods to assay for functional dsRNA that are capable of reducing the level of a target sequence are well known and disclosed elsewhere herein.

[0305] In certain embodiments, at least one strand of the duplex or double-stranded region of the dsRNA shares sufficient sequence identity or sequence complementarity to the target polynucleotide to allow the dsRNA to reduce the level of expression of the target sequence. In some embodiments, a dsRNA has substantial sequence identity to the target polynucleotide, typically greater than about 65% sequence identity, greater than about 70% sequence identity, greater than about 80% sequence identity, greater than about 85% sequence identity, about 90%, 91%, 92%, 93%, 94%, 95%, 96%, 97%, 98% or 99% sequence identity. The dsRNA may be fully complementary (i.e., 100% identical) to the target sequence, or the complement thereof.

[0306] The dsRNA can be any length so long as it reduces the level of the target sequence. The dsRNA can be, for example, at least 15, 16, 17, 18, 19, 20, 21, 22, 23, 24, 25, 50, 100, 200, 300, 400, 450 nucleotides of the sequence of any of SEQ ID NOS: 36-104, or variants or fragments thereof, or complements thereof. In some embodiments, dsRNA can be, for example, at least 15, 16, 17, 18, 19, 20, 21, 22, 23, 24, 25, 50, 100, 200, 300 nucleotides of any of SEQ ID NOS: 139-173, or variants or fragments thereof, or complements thereof.

[0307] In another embodiment, the dsRNA comprises a hairpin RNA. A hairpin RNA comprises an RNA molecule that is capable of folding back onto itself to form a double stranded structure. Multiple structures can be employed as hairpin elements. In certain embodiments, the dsRNA suppression element comprises an hairpin element which comprises in the following order, a first segment, a second segment, and a third segment, where the first and the third segment share sufficient complementarity to allow the transcribed RNA to form a double-stranded stem-loop structure.

[0308] The “second segment” of the hairpin comprises a “loop” or a “loop region”. These terms are used synonymously herein and are to be construed broadly to comprise any nucleotide sequence that confers enough flexibility to allow self-pairing to occur between complementary regions of a polynucleotide (i.e., segments 1 and 3 which form the stem of the hairpin). For example, in some embodiments, the loop region may be substantially single stranded and act as a spacer between the self-complementary regions of the hairpin stem-loop. In some embodiments, the loop region can comprise a random or nonsense nucleotide sequence and thus not share sequence identity to a target sequence. In other embodiments, the loop region comprises a sense or an antisense RNA sequence or fragment thereof that shares identity to a target sequence. In certain embodiments, the loop sequence can include an intron sequence, a sequence derived from an intron sequence, a sequence homologous to an intron sequence, or a modified intron sequence. The intron sequence can be one found in the same or a different species from which segments 1 and 3 are derived. In certain embodiments, the loop region can be optimized to be as short as possible while still providing enough intramolecular flexibility to allow the formation of the base-paired stem region. Accordingly, the loop sequence is generally less than 1000, 900, 800, 700, 600, 500, 400, 300, 200, 100, 50, 25, 20, 19, 18, 17, 16, 15, 10 nucleotides.

[0309] The “first” and the “third” segment of the hairpin RNA molecule comprise the base-paired stem of the hairpin structure. The first and the third segments are inverted repeats of one another and share sufficient complementarity to allow the formation of the base-paired stem region. In certain embodiments, the first and the third segments are fully complementary to one another. Alternatively, the first and the third segment may be partially complementary to each other so long as they are capable of hybridizing to one another to form a base-paired stem region. The amount of complementarity between the first and the third segment can be calculated as a percentage of the entire segment. Thus, the first and the third segment of the hairpin RNA generally share at least 50%, 60%, 70%, 80%, 85%, 90%, 91%, 92%, 93%, 94%, 95%, 96%, 97%, 98%, 99%, up to and including 100% complementarity.

[0310] The first and the third segment are at least about 1000, 500, 475, 450, 425, 400, 375, 350, 325, 300, 250, 225, 200, 175, 150, 125, 100, 75, 60, 50, 40, 30, 25, 22, 21, 20, 19, 18, 17, 16, 15 or 10 nucleotides in length. In certain embodiments, the length of the first and/or the third segment is about 10-100 nucleotides, about 10 to about 75 nucleotides, about 10 to about 50 nucleotides, about 10 to about 40 nucleotides, about 10 to about 35 nucleotides, about 10 to about 30 nucleotides, about 10 to about 25 nucleotides, about 10 to about 19 nucleotides, about 10 to about 20 nucleotides, about 19 to about 50 nucleotides, about 50 nucleotides to about 100 nucleotides, about 100 nucleotides to about 150 nucleotides, about 100 nucleotides to about 300 nucleotides, about 150 nucleotides to about 200 nucleotides, about 200 nucleotides to about 250 nucleotides, about 250 nucleotides to about 300 nucleotides, about 300 nucleotides to about 350 nucleotides, about 350 nucleotides to about 400 nucleotides, about 400 nucleotide to about 500 nucleotides, about 600 nucleotides, about 700 nucleotides, about 800 nucleotides, about 900 nucleotides, about 1000 nucleotides, about 1100 nucleotides, about 1200 nucleotides, about 1300 nucleotides, 1400 nucleotides, 1500 nucleotides, 1600 nucleotides, 1700 nucleotides, 1800 nucleotides, 1900 nucleotides, 2000 nucleotides or longer. In other embodiments, the length of the first and/or the third segment comprises at least 10-19 nucleotides, 10-20 nucleotides; 19-35 nucleotides; 20-35 nucleotides; 30-45 nucleotides; 40-50 nucleotides; 50-100 nucleotides; 100-300 nucleotides; about 500-700 nucleotides; about 700-900 nucleotides; about 900-1100 nucleotides; about 1300-1500 nucleotides; about 1500-1700 nucleotides; about 1700-1900 nucleotides; about 1900-2100 nucleotides; about 2100-2300 nucleotides; or about 2300-2500 nucleotides.

[0311] In some embodiments, the first and the third segment comprise at least 20 nucleotides having at least 85% complementary to the first segment. In still other embodiments, the first and the third segments which form the stem-loop structure of the hairpin comprise 3′ or 5′ overhang regions having unpaired nucleotide residues.

[0312] In other embodiments, the first and the third segments do not correspond to a target sequence. In these embodiments, the first and third segments flank a loop sequence that comprises a nucleotide sequence complementary to all or part of the target sequence. Thus, it is the loop region that determines the specificity of the RNA interference.

[0313] The sequence identity of the domains of the first, the second and/or the third segments complementary to a target polynucleotide need only be sufficient to reduce the level of the target sequence. See, for example, Chuang and Meyerowitz (2000) Proc. Natl. Acad. Sci. USA 97:4985-4990; Stoutjesdijk et al. (2002) Plant Physiol. 129:1723-1731; Waterhouse and Helliwell (2003) Nat. Rev. Genet. 4:29-38; Pandolfini et al. BMC Biotechnology 3:7, A transient assay for the efficiency of hpRNA constructs to silence gene expression in vivo has been described by Panstruga et al. (2003) Mol. Biol. Rep. 30:135-140.

[0314] The amount of complementarity shared between the first, second, and/or third segment and the target sequence or the amount of complementarity shared between the first segment and the third segment (i.e., the stem of the hairpin structure) may vary. In some embodiments, 100% identity is required. In other embodiments, sequence variability may be tolerated as long a nucleotide region of the sequence (e.g., at least 22 nucleotides) is 100% identical to the target sequence.

[0315] Transcriptional gene silencing (TGS) may be accomplished through use of a hairpin suppression element where the inverted repeat of the hairpin shares sequence identity with the promoter region of a target sequence to be silenced. See, for example, Aufsatz et al. (2002) PNAS 99 (Suppl. 4): 16499-16506 and Mette et al. (2000) EMBO J 19(19): 5194-5201.

### Small RNA Silencing Element

[0316] A “small RNA” or “sRNA silencing element” can comprise both micro-RNA (miRNA) and short-interfering RNA (siRNA).

[0317] “miRNAs” are small single stranded non-coding RNAs comprising about 19 to about 24 ribonucleotides in length. miRNAs resemble the small interfering RNAs (siRNAs) of the RNA interference (RNAi) pathway, except miRNAs derive from regions of RNA transcripts that fold back on themselves to form short hairpins, whereas siRNAs derive from longer regions of double-stranded RNA.

[0318] Typically, the miRNA is transcribed from DNA sequence into primary miRNA (pri-miRNAs) and processed into precursor miRNA (pre-miRNAs) and mature miRNA.

[0319] For miRNA interference, the silencing element can be designed to express a dsRNA molecule that forms a hairpin structure or partially base-paired structure comprising a 19, 20, 21, 22, 23, 24 or 25 nucleotide sequence that is complementary to the target sequence. The miRNA can be synthetically made or transcribed as a longer RNA which is subsequently cleaved to produce the active miRNA.

[0320] When expressing a miRNA, the mature miRNA is present in a duplex in a precursor backbone structure, the two strands being referred to as the miRNA (the strand that will eventually base pair with the target sequence) and miRNA* (star sequence). miRNA precursors can be transgenically expressed.

[0321] The silencing element for miRNA interference may comprise a miRNA primary sequence. The miRNA primary sequence comprises a DNA sequence (genomic or cDNA) comprising the miRNA and star sequences separated by a loop as well as additional sequences flanking this region that are important for processing. When expressed, the structure of the primary miRNA is such as to allow for the formation of a hairpin RNA structure that can be processed into a mature miRNA.

[0322] In some embodiments, the miRNA precursor backbone comprises an heterologous miRNA and corresponding star sequence.

[0323] As used herein, a “star sequence” is the sequence within a miRNA precursor backbone that is complementary to the miRNA and forms a duplex with the miRNA to form the stem structure of a hairpin RNA.

[0324] In some embodiments, the star sequence can comprise less than 100% complementarity to the miRNA sequence. Alternatively, the star sequence can comprise at least 99%, 98%, 97%, 96%, 95%, 90%, 85%, 80% or lower sequence complementarity to the miRNA sequence as long as the star sequence has sufficient complementarity to the miRNA sequence to form a double stranded structure.

[0325] In still further embodiments, the star sequence comprises a sequence having 1, 2, 3, 4, 5 or more mismatches with the miRNA sequence and still has sufficient complementarity to form a double stranded structure with the miRNA sequence resulting in production of miRNA and reduction of the target sequence.

[0326] The miRNA precursor backbones can be from any plant or insect. In some embodiments, the miRNA precursor backbone is from a dicot. MicroRNA precursor backbones have been described previously (see, for example, Bally R, et al. (2020) Plant Biotechnol J 18(9): 1925-1932).

[0327] Thus, the primary miRNA can be altered to allow for efficient insertion of heterologous miRNA and star sequences within the miRNA precursor backbone. In such instances, the miRNA segment and the star segment of the miRNA precursor backbone are replaced with the heterologous miRNA and the heterologous star sequences, designed to target any sequence of interest, using a PCR technique and cloned into an expression construct. It is recognized that there could be alterations to the position at which the artificial miRNA and star sequences are inserted into the backbone. Methods for inserting the miRNA and star sequence into the miRNA precursor backbone are well known in the art.

[0328] When designing a miRNA sequence and star sequence, various design choices can be made. See, for example, Schwab R, et al. (2005) Dev Cell 8:517-27. In non-limiting embodiments, the miRNA sequences can have a “U” at 5′-end, a “C” or “G” at the 19th nucleotide position, and an “A” or “U” at the 10th nucleotide position. In other embodiments, the miRNA design is such that the miRNA have a high free delta-G as calculated using the ZipFold algorithm (Markham, N. R. & Zuker, M. (2005) Nucleic Acids Res. 33: W577-W581.) Optionally, a one base pair change can be added within 5′ portion of the miRNA so that the sequence differs from the target sequence by one nucleotide.

### Variants and Fragments

[0329] As used herein, “fragment” refers to a portion of the polynucleotide that retain the ability to reduce expression of the target sequence.

[0330] Fragments of a nucleotide sequence may range from at least about 10 nucleotides, about 15 nucleotides, about 16 nucleotides, about 17 nucleotides, about nucleotides 18, about 19 nucleotides, about 20 nucleotides, about 21 nucleotides, about 22 nucleotides, about 50 nucleotides, about 75 nucleotides, about 100 nucleotides, about 200 nucleotides, about 300 nucleotides, about 400 nucleotides, about 500 nucleotides, about 600 nucleotides, about 700 nucleotides and up to and including one nucleotide less than the full-length polynucleotide.

[0331] Alternatively, fragments of a nucleotide sequence may range from 1-50, 25-75, 75-125, 50-100, 125-175, 175-225, 100-150, 100-300, 150-200, 200-250, 225-275, 275-325, 250-300, 325-375, 375-425, 300-350, 350-400, 425-475, 400-450, 475-525, 450-500, 525-575, 575-625, 550-600, 625-675, 675-725, 600-650, 625-675, 675-725, 650-700, 725-825, 825-875, 750-800, 875-925, 925-975, 850-900, 925-975, 975-1025, 950-1000, 1000-1050, 1025-1075, 1075-1125, 1050-1100, 1125-1175, 1100-1200, 1175-1225, 1225-1275, 1200-1300, 1325-1375, 1375-1425, 1300-1400, 1425-1475, 1475-1525, 1400-1500, 1525-1575, 1575-1625, 1625-1675, 1675-1725, 1725-1775, 1775-1825, 1825-1875, 1875-1925, 1925-1975, 1975-2025, 2025-2075, 2075-2125, 2125-2175, 2175-2225, 1500-1600, 1600-1700, 1700-1800, 1800-1900, 1900-2000 of any one of SEQ ID NOS: 36-104, or variants, isoforms or complements thereof. In some embodiments the nucleotide sequence is from 1-50, 25-75, 75-125, 50-100, 125-175, 175-225, 100-150, 100-300, 150-200, 200-250, 225-275, 275-300, 250-300 of any one of SEQ ID NOS: 139-173, or variants, isoforms or complements thereof. In other embodiments, the nucleotide sequence is from 100-300 of any one of SEQ ID NOS: 139-173, or variants, isoforms or complements thereof. Methods to assay for the activity of a desired silencing element are well known and described elsewhere herein.

[0332] As used herein “variant” refers to a polynucleotide comprising one or more nucleotide deletions, insertions, substitutions that retains the ability to reduce expression of the target sequence. As used herein “variant” also refers to a polynucleotide comprising one or more modified sugars, nucleobases and/or internucleoside linkages.

[0333] As used herein, a “nucleoside” is a base-sugar combination and “nucleotides” are nucleosides that further include a phosphate group covalently linked to the sugar portion of the nucleoside.

[0334] As used herein, a nucleoside with a modified sugar residue is any nucleoside wherein the ribose sugar of the nucleoside has been substituted with a chemically modified sugar moiety. In the context of the present disclosure, the chemically modified sugar moieties include, but are not limited to, 2′-O-methoxyethyl, 2′-fluoro, 2′-dimethylaminooxyethoxy, 2′-dimethylaminoethoxyethoxy, 2′-guanidinium, 2′-O-guanidinium ethyl, 2′-carbamate, 2′-aminooxy, 2′-acetamido and locked nucleic acid. The term nucleobase includes the purine (e.g. adenine and guanine) and pyrimidine (e.g. uracil, thymine and cytosine) moiety present in nucleosides and nucleotides which form hydrogen bonds in nucleic acid hybridization. In the context of the present disclosure, the term nucleobase also encompasses modified nucleobases. In this context “nucleobase” refers to both naturally occurring nucleobases such as adenine, guanine, cytosine, thymidine, uracil, xanthine and hypoxanthine, as well as non-naturally occurring variants.

[0335] In some embodiments, the nucleobase moiety is modified by changing the purine or pyrimidine into a modified purine or pyrimidine, such as substituted purine or substituted pyrimidine, such as a nucleobase selected from isocytosine, pseudoisocytosine, 5-methyl cytosine, 5-thiozolo-cytosine, 5-propynyl-cytosine, 5-propynyl-uracil, 5-bromouracil 5-thiazolo-uracil, 2-thio-uracil, 2′thio-thymine, inosine, diaminopurine, 6-aminopurine, 2-aminopurine, 2,6-diaminopurine and 2-chloro-6-aminopurine.

[0336] In some embodiments, the modified internucleoside linkage increases the nuclease resistance of the polynucleotide compared to a phosphodiester linkage. For naturally occurring oligonucleotides, the internucleoside linkage includes phosphate groups creating a phosphodiester bond between adjacent nucleosides. Modified internucleoside linkages are particularly useful in stabilizing polynucleotides for in vivo use, and may serve to protect against nuclease cleavage at regions of DNA or RNA nucleosides in the polynucleotide of the invention, for example within the gap region of a gapmer polynucleotide, as well as in regions of modified nucleosides.

[0337] In some embodiments the internucleoside linkage comprises sulphur(S), such as a phosphorothioate internucleoside linkage. A phosphorothioate internucleoside linkage is particularly useful due to nuclease resistance, beneficial pharmacokinetics and ease of manufacture. In some embodiments at least 50% of the internucleoside linkages in the polynucleotide, or contiguous nucleotide sequence thereof, are phosphorothioate, such as at least 60%, such as at least 70%, such as at least 80 or such as at least 90% of the internucleoside linkages in the polynucleotide, or contiguous nucleotide sequence thereof, are phosphorothioate. In some embodiments all of the internucleoside linkages of the polynucleotide, or contiguous nucleotide sequence thereof, are phosphorothioate.

[0338] Other internucleoside linkages are known in the art and include, for example, —O—P(O)₂—O—, —O—P(O,S)—O—, —O—P(S)₂—O—, —S—P(O)₂—O—, —S—P(O,S)—O—, —S—P(S)₂—O—, —O—P(O)₂—S—, —O—P(O,S)—S—, —S—P(O)₂—S—, —O—PO(RH)—O—, O—PO(OCH₃)—O—, —O—PO(NRH)—O—, —O—PO(OCH₂CH₂S—R)—O—, —O—PO(BH₃)—O—, —O—PO(NHRH)—O—, —O—P(O)₂—NRH—, —NRH—P(O)₂—O—, —NRH—CO—O—, —NRH—CO—NRH—; and —O—CO—O—, —O—CO—NRH—, —NRH—CO—CH₂—, —O—CH₂—CO—NRH—, —O—CH₂—CH₂—NRH—, —CO—NRH—CH₂—, —CH₂—NRHCO—, —O—CH₂—CH₂—S—, —S—CH₂—CH₂—O—, —S—CH₂—CH₂—S—, —CH₂—SO₂—CH₂—, —CH₂—CO—NRH—, —O—CH₂—CH₂—NRH—CO—, —CH₂—NCH₃—O—CH₂—, where RH is selected from hydrogen and C1-4-alkyl.

[0339] The term “modified polynucleotide” describes a polynucleotide comprising one or more sugar-modified nucleosides, modified nucleobases and/or modified internucleoside linkages.

[0340] The term “chimeric polynucleotide” can be used to describe a polynucleotide comprising bases that are a mix of different chemistries, or a gapmer, where some modifications are placed on the “wings” and not the central bases.

[0341] Generally, variants of a particular disclosed polynucleotide will have at least about 40%, 45%, 50%, 55%, 60%, 65%, 70%, 75%, 80%, 85%, 90%, 91%, 92%, 93%, 94%, 95%, 96%, 97%, 98%, 99% or more sequence identity to that particular polynucleotide as determined by sequence alignment programs and parameters described elsewhere herein.

### Constructs

[0342] The use of the term “polynucleotide” is not intended to be limiting to polynucleotides comprising DNA. Those of ordinary skill in the art will recognize that polynucleotides can comprise ribonucleotides and combinations of ribonucleotides and deoxyribonucleotides. Such deoxyribonucleotides and ribonucleotides include both naturally occurring molecules and synthetic analogues. The disclosed polynucleotides also encompass all forms of sequences including, but not limited to, single-stranded forms, double-stranded forms, hairpins, stem-and-loop structures, and the like.

[0343] The polynucleotide encoding the silencing element or in certain embodiments employed in the disclosed methods and compositions can be provided in expression cassettes for expression in a plant or plant cell or host cell or organism.

[0344] It is recognized that multiple silencing elements including multiple identical silencing elements, multiple silencing elements targeting different regions of the target sequence, or multiple silencing elements targeting different target sequences can be used. In this embodiment, it is recognized that each silencing element may be encoded by a single or separate cassette, DNA construct, or vector. In some embodiments, the silencing element may be encoded by a plasmid, provided with an origin of replication. As discussed, any means of providing the silencing element is contemplated.

[0345] A plant or plant cell or host cell or organism can be transfected or transformed with a single cassette comprising DNA encoding one or more silencing elements or separate cassettes encoding a silencing element. Likewise, a plant or organism transformed with one component can be subsequently transformed with the second component. One or more DNA constructs encoding silencing elements can also be brought together by sexual crossing. That is, a first plant comprising one component is crossed with a second plant comprising the second component. Progeny plants from the cross will comprise both components.

[0346] Suitable host cells include the prokaryotes and the lower eukaryotes, such as fungi. Illustrative prokaryotes, both Gram-negative and Gram-positive, include Enterobacteriaceae, such as Escherichia, Erwinia, Shigella, Salmonella, and Proteus; Bacillaceae; Rhizobiceae, such as Rhizobium; Spirillaceae, such as Photobacterium, Zymomonas, Serratia, Aeromonas, Vibrio, Desulfovibrio, Spirillum; Lactobacilloae; Pseudomonadaceae, such as Pseudomonas and Acetobacter; Azotobacteraceae and Nitrobacteraceae. Among eukaryotes are fungi, such as Phycomycetes and Ascomycetes, which includes yeast, such as Saccharomyces and Schizosaccharomyces; and Basidiomycetes yeast, such as Rhodotorula, Aureobasidium, Sporobolomyces, and the like. Other eukaryotes include insect cells, for example, insect cells that can be infected by a virus such as a baculovirus.

[0347] Characteristics of particular interest in selecting a host cell may include ease of introducing the coding sequence into the host, availability of expression systems, efficiency of expression, stability in the host, and the presence of auxiliary genetic capabilities.

[0348] The silencing elements disclosed herein may be produced by introducing heterologous genes into a cellular host. For example, expression cassettes can be constructed which include the polynucleotide of interest operably linked with the transcriptional and translational regulatory signals for expression of the nucleotide constructs. The expression cassettes may also include a nucleotide sequence homologous with a sequence in the host cell, whereby integration will occur, and/or a replication system that is functional in the host, whereby integration or stable maintenance will occur. The expression cassettes may be transformed/transfected into a suitable host cell according to standard protocols of state of the art.

[0349] Transcriptional and translational regulatory signals include, but are not limited to, promoters, transcriptional initiation start sites, operators, activators, enhancers, other regulatory elements, ribosomal binding sites, an initiation codon, termination signals, and the like. See, for example, Sambrook et al. (2000); Molecular Cloning: A Laboratory Manual (3rd edition; Cold Spring Harbor Laboratory Press, Plainview, NY); Davis et al. (1980) Advanced Bacterial Genetics (Cold Spring Harbor Laboratory, Cold Spring Harbor, NY); and the references cited therein.

[0350] The expression cassette can include 5′ and 3′ regulatory sequences operably linked to the polynucleotide of the invention. “Operably linked” is intended to mean a functional linkage between two or more elements. For example, an operable linkage between a polynucleotide of the invention and a regulatory sequence (i.e., a promoter) is a functional link that allows for expression of the polynucleotide.

[0351] Operably linked elements may be contiguous or non-contiguous. The cassette may additionally contain at least one additional polynucleotide to be co-transformed into the plant or plant cell or host cell or organism. Alternatively, the additional polynucleotide(s) can be provided on multiple expression cassettes. Expression cassettes can be provided with a plurality of restriction sites and/or recombination sites for insertion of the polynucleotide to be under the transcriptional regulation of the regulatory regions. The expression cassette may additionally contain selectable marker genes.

[0352] The expression cassette can include in 5′-3′ direction of transcription, a transcriptional initiation region (i.e., a promoter), a polynucleotide encoding the silencing element employed in the methods and compositions of the invention, and a transcriptional termination region (i.e., termination region) functional in the plant, plant cell, or host cell or organism.

[0353] In other embodiments, the dsRNA is expressed from a suppression cassette. Such a cassette can comprise two convergent promoters that drive transcription of an operably linked silencing element.

[0354] “Convergent promoters” refers to promoters that are oriented on either terminus of the operably linked polynucleotide encoding the silencing element such that each promoter drives transcription of the silencing element in opposite directions, yielding two transcripts. In such embodiments, the convergent promoters allow for the transcription of the sense and anti-sense strand and thus allow for the formation of a dsRNA post-transcriptionally.

[0355] Such a cassette may also comprise two divergent promoters that drive transcription of one or more operably linked polynucleotides encoding the silencing elements.

[0356] “Divergent promoters” refers to promoters that are oriented in opposite directions of each other, driving transcription of the one or more polynucleotides encoding the silencing elements in opposite directions. In such embodiments, the divergent promoters allow for the transcription of the sense and antisense strands and allow for the formation of a dsRNA. In such embodiments, the divergent promoters also allow for the transcription of at least two separate hairpin RNAs.

[0357] In another embodiment, one cassette comprising two or more polynucleotides encoding the silencing elements under the control of two separate promoters in the same orientation is present in a construct. In another embodiment, two or more individual cassettes, each comprising at least one polynucleotide encoding the silencing element under the control of a promoter, are present in a construct in the same orientation.

[0358] The regulatory regions (i.e., promoters, transcriptional regulatory regions, and transcriptional termination regions) and/or the polynucleotides disclosed herein may be native/analogous to the host cell or to each other. Alternatively, the regulatory regions and/or the polynucleotide disclosed herein may be heterologous to the host cell or to each other.

[0359] As used herein, “heterologous” in reference to a sequence is a sequence that originates from a foreign species, or, if from the same species, is substantially modified from its native form in composition and/or genomic locus by deliberate human intervention. For example, a promoter operably linked to a heterologous polynucleotide is from a species different from the species from which the polynucleotide was derived, or, if from the same/analogous species, one or both are substantially modified from their original form and/or genomic locus, or the promoter is not the native promoter for the operably linked polynucleotide.

[0360] As used herein, a chimeric gene comprises a coding sequence operably linked to a transcription initiation region that is heterologous to the coding sequence.

[0361] The termination region may be native with the transcriptional initiation region, may be native with the operably linked polynucleotide encoding the silencing element, may be native with the host, or may be derived from another source (i.e., foreign or heterologous) to the promoter, the polynucleotide encoding the silencing element, the host, or any combination thereof. Termination regions include but are not limited to, prokaryotic terminators, like T7, T3, or SP6 terminators or the like. Other termination regions include those from the Ti-plasmid of A. tumefaciens, such as the octopine synthase and nopaline synthase termination regions. See also Guerineau et al. (1991) Mol. Gen. Genet. 262:141-144; Proudfoot (1991) Cell 64:671-674; Sanfacon et al. (1991) Genes Dev. 5:141-149; Mogen et al. (1990) Plant Cell 2:1261-1272; Munroe et al. (1990) Gene 91:151-158; Ballas et al. (1989) Nucleic Acids Res. 17:7891-7903; and Joshi et al. (1987) Nucleic Acids Res. 15:9627-9639.

[0362] Additional sequence modifications are known to enhance gene expression in a cellular host. These include elimination of sequences encoding spurious polyadenylation signals, exon-intron splice site signals, transposon-like repeats, and other such well-characterized sequences that may be deleterious to gene expression. The G-C content of the sequence may be adjusted to levels average for a given cellular host, as calculated by reference to known genes expressed in the host cell.

[0363] In preparing the expression cassette, the various DNA fragments may be manipulated, so as to provide for the DNA sequences in the proper orientation and, as appropriate, in the proper reading frame. Toward this end, adapters or linkers may be employed to join the DNA fragments or other manipulations may be involved to provide for convenient restriction sites, removal of superfluous DNA, removal of restriction sites, or the like. For this purpose, in vitro mutagenesis, primer repair, restriction, annealing, re-substitutions, e.g., transitions and trans versions, may be involved.

[0364] A number of promoters can be used in the practice of the invention. The promoters can be selected based on the desired outcome. The nucleic acids can be combined with constitutive, tissue-preferred, inducible, or other promoters for expression in the host.

[0365] Such promoters include prokaryotic promoters, like T7, T3, or SP6 promoters or the like (Dunn and Studier (1983), J. Mol. Biol., 166, 477-535; Chakraborty, Salvo, Majumder, Maitra, (1977), Biol. Chem., 252, 6485-6493; Krieg and Melton (1987) Methods Enzymol., 155 397-415). Promoters and other expression signals may be selected to be compatible with the host cell for which the expression vector is designed. A suitable promoter for use is the inducible lacZ gene promoter, which is induced in the presence of Isopropylthiogalactosid (IPTG) (Hu and Davidson (1987), Cell, 48, 555-566). Other combinations are, for example, but not limited to any promoter which is controlled by the tetracycline repressor (Gossen and Bujard, (1992), Proc. Natl. Acad. Sci., USA, 89, 5547-5551), streptogramin-repressor (Fussenegger et al., (2000) Nature Biotechnol., 18, 1203-1208) or a inducible heat shock promoter.

[0366] Constitutive promoters include, for example, the core promoter of the Rsyn7 promoter and other constitutive promoters disclosed in WO 99/43838 and U.S. Pat. No. 6,072,050; the core CaMV 35S promoter (Odell et al. (1985) Nature 313:810-812); rice actin (McElroy et al. (1990) Plant Cell 2:163-171); ubiquitin (Christensen et al. (1989) Plant Mol. Biol. 12:619-632 and Christensen et al. (1992) Plant Mol. Biol. 18:675-689); pEMU (Last et al. (1991) Theor. Appl. Genet. 81:581-588); MAS (Velten et al. (1984) EMBO J. 3:2723-2730); ALS promoter (U.S. Pat. No. 5,659,026), and the like. Other constitutive promoters include, for example, U.S. Pat. Nos. 5,608,149; 5,608,144; 5,604,121; 5,569,597; 5,466,785; 5,399,680; 5,268,463; 5,608,142; and 6,177,611.

[0367] Depending on the desired outcome, it may be beneficial to express the gene from an inducible promoter. An inducible promoter, for instance, a pathogen-inducible promoter could also be employed. Such promoters include those from pathogenesis-related proteins (PR proteins), which are induced following infection by a pathogen; e.g., PR proteins, SAR proteins, beta-1,3-glucanase, chitinase, etc. See, for example, Redolfi et al. (1983) Neth. J. Plant Pathol. 89:245-254; Uknes et al. (1992) Plant Cell 4:645-656; and Van Loon (1985) Plant Mol. Virol. 4:111-116. See also WO 99/43819.

[0368] Chemical-regulated promoters can be used to modulate the expression of a gene in a plant through the application of an exogenous chemical regulator. Depending upon the objective, the promoter may be a chemical-inducible promoter, where application of the chemical induces gene expression, or a chemical-repressible promoter, where application of the chemical represses gene expression. Chemical-inducible promoters are known in the art and include, but are not limited to, the maize In2-2 promoter, which is activated by benzenesulfonamide herbicide safeners, the maize GST promoter, which is activated by hydrophobic electrophilic compounds that are used as pre-emergent herbicides, and the tobacco PR-la promoter, which is activated by salicylic acid. Other chemical-regulated promoters of interest include steroid-responsive promoters (see, for example, the glucocorticoid-inducible promoter in Schena et al. (1991) Proc. Natl. Acad. Sci. USA 88:10421-10425 and McNellis et al. (1998) Plant J. 14(2):247-257) and tetracycline-inducible and tetracycline-repressible promoters (see, for example, Gatz et al. (1991) Mol. Gen. Genet. 227:229-237, and U.S. Pat. Nos. 5,814,618 and 5,789,156).

[0369] Tissue-preferred promoters can be utilized to target enhanced expression within a particular plant tissue. Tissue-preferred promoters include Yamamoto et al. (1997) Plant J. 12(2):255-265; Kawamata et al. (1997) Plant Cell Physiol. 38(7):792-803; Hansen et al. (1997) Mol. Gen Genet. 254(3):337-343; Russell et al. (1997) Transgenic Res. 6(2): 157-168; Rinehart et al. (1996) Plant Physiol. 112(3): 1331-1341; Van Camp et al. (1996) Plant Physiol. 112(2):525-535; Canevascini et al. (1996) Plant Physiol. 112(2):513-524; Yamamoto et al. (1994) Plant Cell Physiol. 35(5):773-778; Lam (1994) Results Probl. Cell Differ. 20:181-196; Orozco et al. (1993) Plant Mol Biol. 23(6): 1129-1138; Matsuoka et al. (1993) Proc Natl. Acad. Sci. USA 90(20):9586-9590; and Guevara-Garcia et al. (1993) Plant J. 4(3):495-505. Such promoters can be modified, if necessary, for weak expression.

[0370] Leaf-preferred promoters are known in the art. See, for example, Yamamoto et al. (1997) Plant J. 12(2):255-265; Kwon et al. (1994) Plant Physiol. 105:357-67; Yamamoto et al. (1994) Plant Cell Physiol. 35(5):773-778; Gotor et al. (1993) Plant J. 3:509-18; Orozco et al. (1993) Plant Mol. Biol. 23(6):1129-1138; and Matsuoka et al. (1993) Proc. Natl. Acad. Sci. USA 90(20):9586-9590.

[0371] Seed-preferred” promoters include both “seed-specific” promoters (those promoters active during seed development such as promoters of seed storage proteins) as well as “seed-germinating” promoters (those promoters active during seed germination). See Thompson et al. (1989) BioEssays 10:108. Such seed-preferred promoters include, but are not limited to, Ciml (cytokinin-induced message); cZ19BI (maize 19 kDa zein); and milps (myo-inositol-1-phosphate synthase) (see U.S. Pat. No. 6,225,529). Gamma-zein and Glob-1 are endosperm-specific promoters. For dicots, seed-specific promoters include, but are not limited to, bean Y-phaseolin, napin, Y-conglycinin, soybean lectin, cruciferin, and the like. A promoter that has “preferred” expression in a particular tissue is expressed in that tissue to a greater degree than in at least one other plant tissue. Some tissue-preferred promoters show expression almost exclusively in the particular tissue.

[0372] In an embodiment, the plant-expressed promoter is a vascular-specific promoter such as a phloem-specific promoter. A “vascular-specific” promoter, as used herein, is a promoter which is at least expressed in vascular cells, or a promoter which is preferentially expressed in vascular cells. Expression of a vascular-specific promoter need not be exclusively in vascular cells, expression in other cell types or tissues is possible. A “phloem-specific promoter” as used herein, is a plant-expressible promoter which is at least expressed in phloem cells, or a promoter which is preferentially expressed in phloem cells.

[0373] Expression of a phloem-specific promoter need not be exclusively in phloem cells, expression in other cell types or tissues, e.g., xylem tissue, is possible. In one embodiment of this invention, a phloem-specific promoter is a plant-expressible promoter at least expressed in phloem cells, wherein the expression in non-phloem cells is more limited (or absent) compared to the expression in phloem cells. Examples of suitable vascular-specific or phloem-specific promoters include but are not limited to the promoters selected from the group consisting of: the SCSV3, SCSV4, SCSV5, and SCSV7 promoters (Schunmann et al. (2003) Plant Functional Biology 30:453-60; the rolC gene promoter of Agrobacterium r n′zogewe\hat{ }Kiyokawa et al. (1994) Plant Physiology 104:801-02; Pandolfini et al. (2003) BioMedCentral (BMC) Biotechnology 3:7, (www.biomedcentral.com/1472-6750/3/7); Graham et al. (1997) Plant Mol. Biol. 33:729-35; Guivarc'h et al. (1996); Almon et al. (1997) Plant Physiol. 115:1599-607; the rolA gene promoter of Agrobacterium rhizogenes (Dehio et al. (1993) Plant Mol. Biol. 23:1199-210); the promoter of the Agrobacterium tumefaciens T-DNA gene 5 (Korber et al. (1991) EMBO J. 10:3983-91); the rice sucrose synthase RSsl gene promoter (Shi et al. (1994) /. Exp. Bot. 45:623-31); the CoYMV or Commelina yellow mottle badnavirus promoter (Medberry et al. (1992) Plant Cell 4:185-92; Zhou et al. (1998) Chin. J. Biotechnol. 14:9-16); the CFDV or coconut foliar decay virus promoter (Rohde et al. (1994) Plant Mol. Biol. 27:623-28; Hehn and Rhode (1998) /. Gen. Virol. 79:1495-99); the RTBV or rice tungro bacilliform virus promoter (Yin and Beachy (1995) Plant J. 7:969-80; Yin et al. (1997) Plant J. 12:1179-80); the pea glutamin synthase GS3A gene (Edwards et al. (1990) Proc. Natl. Acad. Sci. USA 87:3459-63; Brears et al. (1991) Plant J. 1:235-44); the inv CD111 and inv CD141 promoters of the potato invertase genes (Hedley et al. (2000) /. Exp. Botany 51:817-21); the promoter isolated from Arabidopsis shown to have phloem-specific expression in tobacco by Kertbundit et al. (1991) Proc. Natl. Acad. Sci. USA 88:5212-16); the VAHOX1 promoter region (Tornero et al. (1996) Plant J. 9:639-48); the pea cell wall invertase gene promoter (Zhang et al. (1996) Plant Physiol. 112:1111-17); the promoter of the endogenous cotton protein related to chitinase of US published patent application No. 20030106097, an acid invertase gene promoter from carrot (Ramloch-Lorenz et al. (1993) The Plant J. 4:545-54); the promoter of the sulfate transporter gene, Sultrl; 3 (Yoshimoto et al. (2003) Plant Physiol. 131:1511-17); a promoter of a sucrose synthase gene (Nolte and Koch (1993) Plant Physiol. 101:899-905); and the promoter of a tobacco sucrose transporter gene (Kuhn et al. (1997) Science 275-1298-1300).

[0374] Possible promoters also include the Black Cherry promoter for Prunasin Hydrolase (PH DL1.4 PRO) (U.S. Pat. No. 6,797,859), Thioredoxin H promoter from cucumber and rice (Fukuda A et al. (2005). Plant Cell Physiol. 46(11): 1779-86), Rice (RSsl) (Shi, T. Wang et al. (1994). /. Exp. Bot. 45(274): 623-631) and maize sucrose synthase-1 promoters (Yang., N-S. et al. (1990) PNAS 87:4144-4148), PP2 promoter from pumpkin Guo, H. et al. (2004) Transgenic Research 13:559-566), At SUC2 promoter (Truernit, E. et al. (1995) Planta 196(3):564-70., At SAM-1 (S-adenosylmethionine synthetase) (Mijnsbrugge K V. et al. (1996) Plant Cell. Physiol. 37(8): 1108-1115), and the Rice tungro bacilliform virus (RTBV) promoter (Bhattacharyya-Pakrasi et al. (1993) Plant J. 4(I): 71-79).

[0375] The expression cassette can also comprise a selectable marker gene for the selection of transformed cells. Selectable marker genes are utilized for the selection of transfected/transformed cells or tissues. Marker genes include genes encoding antibiotic resistance, such as those encoding ampicillin resistance, neomycin phosphotransferase II (NEO) and hygromycin phosphotransferase (HPT), as well as genes conferring resistance to herbicidal compounds, such as glufosinate ammonium, bromoxynil, imidazolinones, and 2,4-dichlorophenoxyacetate (2,4-D). Additional selectable markers include phenotypic markers such as β-galactosidase and fluorescent proteins such as green fluorescent protein (GFP) (Su et al. (2004) Biotechnol Bioeng 85:610-9 and Fetter et al. (2004) Plant Cell 76:215-28), cyan florescent protein (CYP) (Bolte et al. (2004) Cell Science 117:943-54 and Kato et al. (2002) Plant Physiol 729:913-42), and yellow florescent protein (PhiYFP™ from Evrogen, see, Bolte et al. (2004) Cell Science 777:943-54). For additional selectable markers, see generally, Yarranton (1992) Curr. Opin. Biotech. 3:506-511; Christopherson et al. (1992) Proc. Natl. Acad. Sci. USA 89:6314-6318; Yao et al. (1992) Cell 71:63-72; Reznikoff (1992) Mol. Microbiol. 6:2419-2422; Barkley et al. (1980) in The Operon, pp. 177-220; Hu et al. (1987) Cell 48:555-566; Brown et al. (1987) Cell 49:603-612; Figge et al. (1988) Cell 52:713-722; Deuschle et al. (1989) Proc. Natl. Acad. Sci. USA 86:5400-5404; Fuerst et al. (1989) Proc. Natl. Acad. Sci. USA 86:2549-2553; Deuschle et al. (1990) Science 248:480-483; Gossen (1993) Ph.D. Thesis, University of Heidelberg; Reines et al. (1993) Proc. Natl. Acad. Sci. USA 90:1917-1921; Labow et al. (1990) Mol. Cell. Biol. 10:3343-3356; Zambretti et al. (1992) Proc. Natl. Acad. Sci. USA 89:3952-3956; Bairn et al. (1991) Proc. Natl. Acad. Sci. USA 88:5072-5076; Wyborski et al. (1991) Nucleic Acids Res. 19:4647-4653; Hillenand-Wissman (1989) Topics Mol. Struc. Biol. 10:143-162; Degenkolb et al. (1991) Antimicrob. Agents Chemother. 35:1591-1595; Kleinschmidt et al. (1988) Biochemistry 27:1094-1104; Bonin (1993) Ph.D. Thesis, University of Heidelberg; Gossen et al. (1992) Proc. Natl. Acad. Sci. USA 89:5547-5551; Oliva et al. (1992) Antimicrob. Agents Chemother. 36:913-919; Hlavka et al. (1985) Handbook of Experimental Pharmacology, Vol. 78 (Springer-Verlag, Berlin); Gill et al. (1988) Nature 334:721-724. The above list of selectable marker genes is not meant to be limiting. Any selectable marker gene can be used with the compositions and methods described herein.

### Compositions Comprising Silencing Elements

[0376] One or more silencing elements may be provided as an external composition such as a spray or powder to the plant, plant part, seed, a plant insect pest, or an area of cultivation. In another example, a plant is transformed with a DNA construct or expression cassette for expression of at least one silencing element. Either way, the silencing element, when internalised by an insect, can reduce the level of a target sequence and thereby control the pest.

[0377] In one embodiment, the composition is applied to a plant or seed (e.g., by spraying a field or area of cultivation) to protect the plant or seed from the pest. The composition may be applied simultaneously or in succession with other compounds (e.g., other insecticides). Methods of applying the composition include, but are not limited to, foliar application, seed coating, and soil application. The number of applications and the rate of application depend on the intensity of infestation by the pest.

[0378] The compositions may be applied by, for example, spraying, atomizing, dusting, scattering, coating or pouring, introducing into or on the soil, introducing into irrigation water, by seed treatment or general application or dusting at the time when the pest has begun to appear or before the appearance of pests as a protective measure.

[0379] A composition disclosed herein may further be formulated as bait. In this embodiment, the compositions comprise a food substance or an attractant which enhances the attractiveness of the composition to the pest.

[0380] A composition comprising the silencing element may be formulated in an agriculturally suitable and/or environmentally acceptable carrier. Such carriers may be any material that the plant or environment to be treated can tolerate. Furthermore, the carrier must be such that the composition remains effective at controlling a plant insect pest. Examples of such carriers include water, saline, Ringer's solution, dextrose or other sugar solutions, Hank's solution, and other aqueous physiologically balanced salt solutions, phosphate buffer, bicarbonate buffer and Tris buffer. In addition, the composition may include compounds that increase the half-life of a composition.

[0381] The components of the composition disclosed herein may be produced by introducing heterologous genes into a cellular host. Expression of the heterologous sequences results, directly or indirectly, in the intracellular production of a silencing element. These compositions may then be formulated in accordance with conventional techniques for application to the environment hosting a target pest, e.g., soil, water, and foliage of plants.

[0382] The compositions may also comprise one or more of: a penetrant, surface-active agent, an inert carrier, a preservative, a humectant, a feeding stimulant, an attractant, an encapsulating agent, a binder, an emulsifier, a dye, a UV protectant, a buffer, a flow agent or fertilizers, micronutrient donors, or other preparations that influence plant growth. One or more agrochemicals including, but not limited to, herbicides, insecticides, fungicides, bactericides, nematicides, molluscicides, acaracides, plant growth regulators, harvest aids, and fertilizers, can be combined with carriers, surfactants or adjuvants or other components to facilitate product handling and application for particular target pests. Suitable carriers and adjuvants can be solid or liquid and include for example, natural or regenerated mineral substances, solvents, dispersants, wetting agents, tackifiers, binders, or fertilizers.

[0383] Suitable surface-active agents include, but are not limited to, anionic compounds such as a carboxylate of, for example, a metal; carboxylate of a long chain fatty acid; an N-acylsarcosinate; mono- or di-esters of phosphoric acid with fatty alcohol ethoxylates or salts of such esters; fatty alcohol sulfates such as sodium dodecyl sulfate, sodium octadecyl sulfate, or sodium cetyl sulfate; ethoxylated fatty alcohol sulfates; ethoxylated alkylphenol sulfates; lignin sulfonates; petroleum sulfonates; alkyl aryl sulfonates such as alkyl-benzene sulfonates or lower alkylnaphtalene sulfonates, for example, butyl-naphthalene sulfonate; salts of sulfonated naphthalene-formaldehyde condensates; salts of sulfonated phenol-formaldehyde condensates; more complex sulfonates such as the amide sulfonates, for example, the sulfonated condensation product of oleic acid and N-methyl taurine; or the dialkyl sulfosuccinates, for example, the sodium sulfonate or dioctyl succinate. Non-ionic agents include condensation products of fatty acid esters, fatty alcohols, fatty acid amides or fatty-alkyl- or alkenyl-substituted phenols with ethylene oxide, fatty esters of polyhydric alcohol ethers, for example, sorbitan fatty acid esters, condensation products of such esters with ethylene oxide, e.g., polyoxyethylene sorbitan fatty acid esters, block copolymers of ethylene oxide and propylene oxide, acetylenic glycols such as 2,4,7,9-tetraethyl-5-decyn-4,7-diol, or ethoxylated acetylenic glycols. Examples of a cationic surface-active agent include, for instance, an aliphatic mono-, di-, or polyamine such as an acetate, naphthenate or oleate; or oxygen-containing amine such as an amine oxide of polyoxyethylene alkylamine; an amide-linked amine prepared by the condensation of a carboxylic acid with a di- or polyamine; or a quaternary ammonium salt.

[0384] Examples of inert materials include, but are not limited to, inorganic minerals such as kaolin, phyllosilicates, carbonates, sulfates, phosphates, or botanical materials such as cork, powdered corncobs, peanut hulls, rice hulls, and walnut shells.

[0385] The compositions comprising a silencing element may be in a suitable form for direct application or as a concentrate of primary composition that requires dilution with a suitable quantity of water or other dilutant before application.

[0386] In some embodiments, virus-induced gene silencing (VIGS) is used to deliver one or more silencing elements to the insect plant pest itself. For example, an insect virus could be modified to contain a polynucleotide of the disclosure in its genome. Infection and replication of the virus would then lead to the production of silencing elements directly in the insect cells. A major advantage of this delivery method is that a very high efficiency can be achieved, even in otherwise recalcitrant cells. Relying on the virus's own infection processes, physiological and cellular barriers for the uptake of dsRNA from the environment are thus bypassed. Furthermore, viruses can be very host-specific, thereby providing another layer of species-specificity to this technology.

[0387] In other embodiments, a VIGS-like technology using various microbes, such as bacteria, yeast, or fungi that are engineered to serve as vectors to deliver one or more silencing elements to the insect plant pest itself.

[0388] A review of the use of bacteria and viruses for dsRNA delivery is provided in Joga et al. (Front. Physiol. (2016) 7:553) and Zotti et al. (Pest. Manag. Sci. (2018) 74:1239-1250). See, also, WO2000/063397 and WO20030522108.

### LDH Loaded Silencing Elements

[0389] Layered double hydroxides (LDHs) are mixed hydroxides of divalent and trivalent metals having an excess of positive charge that is balanced by interlayer anions. Common forms of LDH comprise Mg²⁺ and Al³⁺ (known as hydrotalcites) and Mg²⁺ and Fe³⁺ (known as pyroaurites) but LDHs containing other cations including Ni, Zn, Mn, Ca, Cr, and La are known. The amount of surface positive charge generated is dependent upon the mole ratio of the metal ions in the lattice structure, and the conditions of preparation as they affect crystal formation.

[0390] The LDH may have the general formula (1):

M^{II}₁₋ₓM^{III}ₓ(OH)₂Aⁿ⁻_{x/n}·yH₂O

where M^{II} and MIII are di- and tri-valent metal ions respectively and Aⁿ⁻ is the interlayer anion of valance n. The x value represents the proportion of bivalent metal to the total amount of metal ion present and y denotes variable, amounts of interlayer water. A limited portion of Aⁿ⁻ may be present on the LDH particle surface (for example, 5-40%, more especially 8-30% most especially 10-20%). This may explain why some dsRNA is adsorbed on the surface.

[0391] General formula (1) may also be written as formula (2);

M^{II}ₙM^{III}(OH)₂ₙ₊₁X·yH₂O

wherein X is one or more anions or negatively charged material to balance charge in the hydroxide layer. X is typically present in the interlayer space in the LDH material. A limited portion of X may be present on the LDH particle surface (for example, 5-40%, more especially 8-30% most especially 10-20%), This may explain why some dsRNA is adsorbed on the surface.

[0392] MII is suitably Mg, although other metal ions of valence 2+ may also be used. MIII is suitably Al. It will be appreciated that other metal ions of valence 3+ may also be used. Examples of other metal ions that may be used include:
[0393] M^{II}: Fe, Co, Ni, Cu, Zn, Mn, Pd, Ti, Cd and Ca
[0394] M^{III}: Co, Fe, Mn, Ga, Rh, Ru, Cr. V, In, Y, Gd, Ni and La.

[0395] These lists should not be considered to be limiting.

[0396] Exemplary anions in formulae (1) or (2) (i.e. Aⁿ⁻ or X) include, but are not limited to, (CO₃)²⁻; Cl⁻, (SO₄)²⁻; Cl⁻; OH; S²⁻ and [Sb(OH)₆].

[0397] The LDH may include a general layer of formula (3)

[M^{II}₁₋ₓM^{III}ₓ(OH)₂]X⁺

M^{II} and M^{III} and x are a defined above for formulae (1) and {2), and the positive charge x+ is balanced by anions (as may be described above for formulae (1) and (2)) which are intercalated between the layers.

[0398] The LDH may be of the hydrotalcite group, the quintinite group, the fougerite group, the woodwardite group, the cualstibite group, the glaueocerinite group, the wermlandite group, and the hydrocalumite group; especially of the hydrotalcite group; more especially hydrotalcite (Mg₆Al₂(OH)₁₆CO₃·4H₂O.

[0399] The hydrotalcite group is LDH of general formula (1), (2) or (3) in which M^{II}:M^{III} is 3:1 (especially in which M^{II} is Mg and M^{III} is Al) with a layer spacing of 6.8. to 8.8 \acute{Å}, especially of 7.3 to 8.3 \acute{Å}, more especially of 7.6 to 8.0 \acute{Å}, most especially about 7.8 \acute{Å}. A discussion on the hydrotalcite group, the quintinite group, the fougerite group, the woodwardite group, the cualstibite group, the glaucocerinite group, the wermlandite group, and the hydrocalumite group may be found in Mills et al., 2012 (Minerakogical Magazine 76:1289-1336). In another embodiment, the LDH is of general formula (1), (2) or (3) in which M^{II} is Mg and M^{III} is Al.

[0400] Exemplary LDH, and methods of making LDH, are described in Australian Patent No. 2005318862, the contents of which are incorporated herein by reference. Advantageously, in the method described in this patent the size of the LDH can be precisely controlled, and the hydrothermal treatment can disperse the LDH agglomerates into individual LDH particles.

[0401] The LDH particles may have a largest dimension within the range of up to 5 μm, more especially up to 1 μm, most especially up to 750 nm or up to 500 nm. In one embodiment, the LDH particles may have a largest dimension within the range 20-400 nm, more suitably 40-300 nm or 50-200 nm, even more suitably about 120 nm, with the thickness of the particles predominantly falling within the range of 5-40 nm, especially 1-20 nm. The particles may also exhibit a narrow particle size distribution, and the particles may show a particle size distribution of +20% around the average size. The LDH particles may have an aspect ratio that, falls within the range of from 5 to 10 (the ‘aspect ratio’ relates to the ratio of the largest dimension of the particle to its thickness or height). The LDH particles may combine together to form an average layer of 20-25 positively charged sheets.

[0402] The average particle size range for standard LDH is typically within about 10-60 micron, for example, about 10 micron, about 25 micron, or about 60 micron.

[0403] In one embodiment, the silencing element, for example, dsRNA is adsorbed onto the LDH has one or more of the dimensions, particle size distribution, or aspect ratio listed above for LDH particles. Scanning Electron Microscope images have confirmed that the morphology of the LDH particles is kept unchanged after loading dsRNA, as a result of the adsorption of dsRNA.

[0404] The dsRNA may be adsorbed onto the LDH by any suitable method, Advantageously, one method of adsorbing the dsRNA onto the LDH simply involves incubating the dsRNA with the LDH in an aqueous solution with shaking (for example, at from 100 to 300 rpm, especially at 200 rpm), and at a temperature front 20 to 50° C., especially from 25 to 45° C., or from 30 to 45° C., most especially about 37° C.

[0405] The dsRNA may also be adsorbed onto the LDH al any suitable loading ratio. Exemplary loading ratios (by mass) include from 2:1 to 1:20 dsRNA:LDH or from 1:1 to 1:10 dsRNA:LDH, more especially from 1:1 to 1:6 dsRNA:LDH or from 1:1 to 1:5 dsRNA:LDH, most especially from 1:1 to 1:4 dsRNA:LDH, from 1:1 to 1:2.5 dsRNA:LDH, from 1:2 to 1:5 dsRNA:LDH or from 1:3 to 1:4 dsRNA:LDH. The loading ratio may be 1:1, 1:1.5, 1:2, 1:2.5, 1:3, 1:3.5 or 1:4 dsRNA:LDH.

[0406] As used herein, the term “adsorbed” includes both circumstances in which dsRNA is adsorbed onto the surface of an LDH layer, as well as circumstances in which dsRNA is intercalated between LDH layers (which would inherently also involve some adsorption).

[0407] It may be advantageous when preparing the composition to use more dsRNA than can be adsorbed on the LDH. This is because if the dsRNA is completely adsorbed on the LDH, then dsRNA may not be immediately available on the plant; some of the LDH would need to break down, or some anion exchange must occur (for example via capture of CO₂ and conversion to HCO₃⁻CO₃²⁻ for anion exchange), before any dsRNA becomes available. Therefore, by using more dsRNA in the composition than can be adsorbed on the LDH, the composition can provide immediate protection to the plant after application. In one embodiment, from 50% to 95% of the dsRNA in the composition is adsorbed onto the LDH (allowing the remainder to be available as free dsRNA); especially from 60% to 90% of the dsRNA in the composition is adsorbed onto the LDH, most especially from 70% to 80% of the dsRNA in the composition is adsorbed onto the LDH. As a rough estimate, at a dsRNA:LDH mass ratio of 1:10, most dsRNA is adsorbed on the LDH surface. At a dsRNA:LDH mass ratio of 1:5, approximately 50% is adsorbed onto the LDH surface, approximately 30-40% is intercalated, and 10-20% is free in solution.

[0408] In one embodiment the dsRNA-LDH composition is in the form of a colloid or suspension, and it may include dsRNA-LDH particles at 10% w/w, especially up to 5% w/w or up to 2% w/w, even more especially about 1% w/w, most especially less than 1% w/w.

[0409] In another embodiment, dsRNA-LDH composition is in the form of a colloid or suspension, and it may include dsRNA-LDH particles at up to 100 mg/L, especially up to 50 mg/L, more especially up to 20 mg/L- or up to 10 mg/L mg/L; most especially less than 10 mg/L. In one embodiment, the concentration of dsRNA-LDH in a colloid or suspension is from 1-100 mg/L.

[0410] The composition may be formulated for administration to the plant, or to any part of the plant, in any suitable way. For example, the composition may be formulated for administration to the leaves, stem, roots, fruit vegetables, grains and/or pulses of the plant. In one embodiment, the composition is formulated for administration to the leaves of the plant and is especially sprayable onto the leaves of the plant. The composition may be administered to the plant as a metered dose. The composition may be formulated for administration to the plant, for example, by spraying, by brush or by another applicator.

[0411] The composition may also be administered to the plant at any suitable concentration, and advantageously the dsRNA in the composition may be effective at relatively low concentrations. In one embodiment, less than 100 μg of dsRNA per plant may be administered, especially less than 50 μg, more especially less than 40, 30, 20, 10 or 5 μg, most especially less than 1 μg or 0.5 μg of dsRNA per plant. When the composition is administered to the leaf of the plant, less than 100 μg of dsRNA per leaf may be administered to the plant, especially less than 50 μg, more especially less than 40, 30, 20, 10 or 5 μg, most especially less than 1 μg or 0.5 μg of dsRNA per leaf is administered to the plant.

### Penetrants

[0412] The term penetrant refers to materials which enhance the penetration of active compounds into plants, insects or both plants and insects, particularly materials which dissolve or penetrate the wax layer on the leaf surface of plants.

[0413] Suitable penetrants are substances that can improve the penetration of the silencing elements into the plant, plant pest or into both plant and plant pest. Examples of penetrants include mineral oils, vegetable oils, esterified vegetable oils, fatty acid esters and poly alkoxylate surfactants and sugar-based surfactants such as alkyl polyglycosides and glucamides. Preferably, the penetrant is selected from mineral oils, vegetable oils, esters of vegetable oils, fatty acid esters having 6-22 carbon atoms in the acid part (preferably 8 to 20 carbon atoms in the acid derived part) and 1-10 carbon atoms in the alcohol derived part, aromatic dicarboxylic acid esters having 1 to 8 carbon atoms in each alcohol derived part, alkanol alkoxylates, alkoxylated silicones and mixtures thereof. More specific examples of preferred penetrants include mineral oil, rapeseed oil (canola oil), sunflower oil, corn oil, linseed oil, oilseed rape (turnip rape) oil, olive oil, cottonseed oil, rapeseed oil methyl ester, rapeseed oil ethyl ester, ethylhexyl laurate, dibutyl succinate, dibutyl adipate, dibutyl phthalate, silicone-penetrants comprising a poly-C₂-C₄-alkyleneoxide modified polydimethylsiloxane (where the poly-C₂-C₄-alkyleneoxide may be of formula (AO) m); and alkanol alkoxylates of formula I:

′R—O-(AO)ₘ—R¹ (I)

wherein, R represents a linear or branched alkyl or alkenyl having from 4 to 20 carbon atoms, AO is C₂-C₄-alkylene oxide groups, i.e. ethylene oxide group (CH₂—CH2-O), Propylene oxide groups (CH(CH₃)—CH₂—O or CH₂—CH(CH₃)—O), butylene oxide groups (CH(C₂H₅)—CH₂—O, C(CH₃)₂—CH₂—O, CH₂—C(CH₃)₂—O or CH₂CH(C₂CH₅)—O, or a mixture of ethylene oxide and propylene oxide or butylene oxide groups, m Represents the number 1 to 30, in particular 2 to 20, and R¹ represents hydrogen or alkyl having 1 to 4 carbon atoms.

[0414] Particularly preferred examples of penetrants are selected from the group consisting of mineral oils, vegetable oils, esters of vegetable oils, polyalkoxylate surfactants and silicone surfactants. In one embodiment the penetrant is selected from paraffinic oil, crop oil, seed oil, methylated seed oil or ethylated seed oil that can dissolve or penetrate the wax layer on the leaf surface. Penetrants may also include those types of oils mixed with 0.5 to about 40% emulsifiers or surfactants to further enhance their utility and effectiveness.

[0415] Specific commercially available examples of preferred penetrants include alkoxylated polydimethyl siloxane non-ionic penetrant (active ingredient: 1020 g/L Polyether modified polysiloxane) available from Nufarm under the tradename PULSE® Penetrant (PULSE is a registered Trademark, or used under license by Nufarm Australia Limited), paraffin oil available under the trademark SUPERCHARGE® Elite spray tank adjuvant from Nufarm Australia Limited and methyl esters of canola oil fatty acids available under the trade marks BANJO® Spray Adjuvant and CANDO® adjuvant from Nufarm Australia Limited.

[0416] The content of penetrant in the compositions of the invention will depend on the nature of the composition and the required activity. Typically, the concentration is in the range of 0.01% w/w to 90% w/w. The composition may be in the form of a concentrate to be diluted prior to application to plants of may be a dilute composition formed for example by mixing components with water in a tank prior to application, for example, by spraying on to plants. In concentrate for the penetrant may for example comprise from 5% w/w to 95% w/w. in contrast dilute compositions for application may for example comprise 0.01% w/w to 5% w/w of the composition.

[0417] The weight ratio of penetrant:silencing element may vary widely depending on the type of composition and the dilution of the components in the composition. For example, in some embodiments the penetrant may be used as a carrier for the silencing dsRNA and/or dsRNA-LDH whereas in other composition the two components may be in distinct phases of a composition containing a plurality of phases such as an aqueous and oil phase, wherein the weight ratio of penetrant:silencing dsRNA is in the range of 1000:1 to 1:20.

Plants, Plant Parts, and Methods of Introducing Sequences into Plants

[0418] In one embodiment, the methods of the invention involve introducing a polynucleotide into a plant. “Introducing” is intended to mean presenting to the plant the polynucleotide in such a manner that the sequence gains access to the interior of a cell of the plant. The methods of the invention do not depend on a particular method for introducing a sequence into a plant, only that the polynucleotide or polypeptides gains access to the interior of at least one cell of the plant. Methods for introducing polynucleotides into plants are known in the art including, but not limited to, stable transformation methods, transient transformation methods, and virus-mediated methods.

[0419] “Stable transformation” is intended to mean that the nucleotide construct introduced into a plant integrates into the genome of the plant and is capable of being inherited by the progeny thereof. “Transient transformation” is intended to mean that a polynucleotide is introduced into the plant and does not integrate into the genome of the plant.

[0420] Transformation protocols as well as protocols for introducing polynucleotide sequences into plants may vary depending on the type of plant or plant cell, e.g., dicot, targeted for transformation. Suitable methods of introducing polynucleotides into plant cells include microinjection (Crossway et al. (1986) Biotechniques 4:320-334), electroporation (Riggs et al. (1986) Proc. Natl. Acad. Sci. USA 83:5602-5606, Agrobacterium-mediated transformation (U.S. Pat. Nos. 5,563,055 and 5,981,840), direct gene transfer (Paszkowski et al. (1984) EMBO J. 3:2717-2722), and ballistic particle acceleration (see, for example, U.S. Pat. Nos. 4,945,050; 5,879,918; 5,886,244; and, 5,932,782; Tomes et al. (1995) in Plant Cell, Tissue, and Organ Culture: Fundamental Methods, ed. Gamborg and Phillips (Springer-Verlag, Berlin); McCabe et al. (1988) Biotechnology 6:923-926); and Lecl transformation (WO 00/28058). Also see Weissinger et al. (1988) Ann. Rev. Genet. 22:421-477; Sanford et al. (1987) Particulate Science and Technology 5:27-37 (onion); Christou et al. (1988) Plant Physiol. 87:671-674 (soybean); McCabe et al. (1988) Bio/Technology 6:923-926 (soybean); Finer and McMullen (1991) In Vitro Cell Dev. Biol. 27P: 175-182 (soybean); Singh et al. (1998) Theor. Appl. Genet. 96:319-324 (soybean); Datta et al. (1990) Biotechnology 8:736-740 (rice); Klein et al. (1988) Proc. Natl. Acad. Sci. USA 85:4305-4309 (maize); Klein et al. (1988) Biotechnology 6:559-563 (maize); U.S. Pat. Nos. 5,240,855; 5,322,783; and, 5,324,646; Klein et al. (1988) Plant Physiol. 91:440-444 (maize); Fromm et al. (1990) Biotechnology 8:833-839 (maize); Hooykaas-Van Slogteren et al. (1984) Nature (London) 311:763-764; U.S. Pat. No. 5,736,369 (cereals); Bytebier et al. (1987) Proc. Natl. Acad. Sci. USA 84:5345-5349 (Liliaceae); De Wet et al. (1985) in The Experimental Manipulation of Ovule Tissues, ed. Chapman et al. (Longman, New York), pp. 197-209 (pollen); Kaeppler et al. (1990) Plant Cell Reports 9:415-418 and Kaeppler et al. (1992) Theor. Appl. Genet. 84:560-566 (whisker-mediated transformation); D'Halluin et al. (1992) Plant Cell 4:1495-1505 (electroporation); Li et al. (1993) Plant Cell Reports 12:250-255 and Christou and Ford (1995) Annals of Botany 75:407-413 (rice); Osjoda et al. (1996) Nature Biotechnology 14:745-750 (maize via Agrobacterium tumefaciens).

[0421] In some embodiments, the polynucleotide may be introduced into plants by contacting plants with a virus or viral nucleic acids. Generally, such methods involve incorporating a nucleotide construct of the invention in a viral DNA or RNA molecule. Further, it is recognized that promoters may also encompass promoters utilized for transcription by viral RNA polymerases. Methods for introducing polynucleotides into plants involving viral DNA or RNA molecules are well known in the art. See, for example, U.S. Pat. Nos. 5,889,191, 5,889,190, 5,866,785, 5,589,367, 5,316,931, and Porta et al. (1996) Molecular Biotechnology 5:209-221.

[0422] Methods are well known in the art for the targeted insertion of a polynucleotide at a specific location in the plant genome. In one embodiment, the insertion of the polynucleotide at a desired genomic location is achieved using a site-specific recombination system. See, for example, WO99/25821, WO99/25854, WO99/25840, WO99/25855, and WO99/25853. Briefly, the polynucleotides may be contained in transfer cassette flanked by two non-recombinogenic recombination sites. The transfer cassette is introduced into a plant having stably incorporated into its genome a target site which is flanked by two non-recombinogenic recombination sites that correspond to the sites of the transfer cassette. An appropriate recombinase is provided and the transfer cassette is integrated at the target site. The polynucleotide of interest is thereby integrated at a specific chromosomal position in the plant genome.

[0423] The cells that have been transformed may be grown into plants according to known methods. See, for example, McCormick et al. (1986) Plant Cell Reports 5:81-84. These plants may then be grown, and either pollinated with the same transformed strain or different strains, and the resulting progeny having constitutive expression of the desired phenotypic characteristic identified. Two or more generations may be grown to ensure that expression of the desired phenotypic characteristic is stably maintained and inherited and then seeds harvested to ensure expression of the desired phenotypic characteristic has been achieved. In this manner, the compositions and methods described herein provide transformed seeds (also referred to as “transgenic seed”) having a polynucleotide disclosed herein, for example, an expression cassette, stably incorporated into their genome.

[0424] As used herein, the term plant includes plant cells, plant protoplasts, plant cell tissue cultures from which plants can be regenerated, plant calli, plant clumps, and plant cells that are intact in plants or parts of plants such as embryos, pollen, ovules, seeds, leaves, flowers, branches, fruit, kernels, ears, cobs, husks, stalks, roots, root tips, anthers, and the like. Grain is intended to mean the mature seed produced by commercial growers for purposes other than growing or reproducing the species. Progeny, variants, and mutants of the regenerated plants are also included within the scope of the disclosure.

[0425] The compositions and methods described herein may be used for transformation of any plant species, including, but not limited to, dicots. Examples of plant species of interest include, but are not limited to Row crops, Soybean, Cotton, Peanuts, Beans, Carrots, Tomato, Broccoli, Lettuce, Cucurbit crops such as Cucumber, Watermelon, Squash, Capsicum, Cabbage, Sweet potato, Eggplant, Ornamentals, Citrus, Chillies.

### Materials and Methods

### Whitefly Colony

[0426] The whitefly, B. tabaci (MEAM1, Biotype B) colonies were kindly provided by Prof. Gimmie Walter's lab at the University of Queensland, St. Lucia, Queensland. The whitefly colonies were obtained from a colony reared on eggplant (Solanum melongena) seedlings, and purity has been confirmed by Prof. Walter's lab using a molecular biotyping. The whiteflies were reared on Hibiscus rosa-sinensis in a growth chamber at 25±2° C., 50±5% relative humidity and 16 h light: 8 h dark photoperiod.

Total RNA Extraction and cDNA Synthesis from Whitefly

[0427] Total RNAs were extracted from different developmental stages of B. tabaci using TRIsure™ Reagent (Bioline, Australia) following the manufacturer's instructions. DNase I (NEB, Australia) treated 1 μg RNA was converted into cDNA using SensiFAST™ CDNA Synthesis Kit (Bioline, Australia) according to the manufacturer's protocol.

In-Vitro Synthesis and Fluorophore-Labeling of dsRNA

[0428] For RNAi experiments, selected fragments of B. tabaci genes were amplified from cDNA obtained from adult whiteflies using PCR. The template DNAs for in vitro transcription of dsRNAs were synthesized using gene-specific primers attached with T7 polymerase promoter sequence (TAATACGACTCACTATAGGG; SEQ ID NO:35) at the 5′ end (Table 1). PCR conditions were 95° C. for 1 min, then 35 cycles of 95° C. for 15 s, 55° C. to 65° C. for 15 s, 72° C. for 10 s, and extension step at 72° C. for 10 min. PCR products were purified using a Wizard SV Gel and PCR Clean-up System (Promega, USA). These purified DNAs were used to synthesize dsRNA using the Hi-Scribe T7 in vitro transcription kit (NEB, Australia) as per the manufacturer's instructions. Briefly, 1 μg of purified DNA was used as a template in a 20 μL in vitro transcription reaction. Each reaction was incubated for at least 4 h at 37° C., followed by 20 min of DNase treatment. The dsRNA was precipitated using 0.1× volume of 3M sodium acetate (pH 5.2) and 2.5× the volume of ice-cold 100% ethanol; incubated at −20° C. for 2 h followed by centrifugation at 4° C. for 20 min. The dsRNA pellet was then washed with 1 mL of 75% ethanol, air-dried and dissolved in nuclease-free water. The concentration of dsRNA was measured on spectrophotometer (Nano Drop 1000, Thermo Scientific US) and integrity was analysed by electrophoresis. dsRNA samples were stored at −20° C. prior to further use.

[0429] For fluorescent (Cy3)-labelling of the GFP and CMV 2b dsRNA, in vitro synthesis of dsRNA was performed as described above except the modified nucleotide in the reaction as follows: 10 mM ATP, 10 mM GTP, 10 mM UTP, 7.5 mM CTP and 2.5 mM Cy3-CTP (Perkin Elmer, Massachusetts, USA). The transcription reaction was incubated at 37° C. for 4 hours and then labelled dsRNA was purified using the RNeasy plus mini kit (Qiagen, Limberg, Netherlands) to avoid contamination of free Cy3-CTP in the final dsRNA solution. Confirmation of dsRNA labelling was confirmed by loading both Cy3-labeled and unlabelled dsRNAs onto 1% agarose gel.

### Selection of Target Genes and Off Target Effects

[0430] To design dsRNA constructs, a reference quality whitefly transcriptome was accessed via NCBI (https://ftp.ncbi.nlm.nih.gov/genomes/all/GCF/001/854/935/GCF_001854935.1_ASM1 85493v1/GCF_001854935.1_ASM185493v1_rna.fna.gz) and RNA-seq files were sourced from the NCBI Sequence read archive (Supplementary Table X). Read files in FASTQ format were adapter trimmed using Trim Galore (https://www.bioinformatics.babraham.ac.uk/projects/trim_galore/). Subsequently, transcript quantification was carried out using Sailfish (Sailfish enables alignment-free isoform quantification from RNA-seq reads using lightweight algorithms. Nature Biotechnology (doi:10.1038/nbt.2862)) and compiled using custom scripts.

[0431] For the generation of an off-target cohort k-mer set, the transcriptomes of Homo sapiens, Apis mellifera (REF), Apis florea (REF), Apis dorsata (REF), Apis cerana (REF) and Danaus plexippus (REF) were accessed via NCBI, with Jellyfish (https://academic.oup.com/bioinformatics/article/27/6/764/234905?login=true) used to count 14 nt k-mers in this dataset. Whitefly transcripts were scanned in an incrementing window of 400 nt to identify regions with the fewest intersecting k-mers with the off-target cohort. Within these regions Primer3 (https://www.ncbi.nlm.nih.gov/pmc/articles/PMC3424584/) via Primer3-py (https://libnano.github.io/primer3-py/) was used to design PCR primers (Table 1) that with the addition of 17 promoter sites could generate templates for in vitro dsRNA synthesis.

TABLE 1
Sequences of primers used for dsRNA synthesis

| | | Amplicon | SEQ |
|---|---|---|---|
| | | length | ID |
| Primer name | Sequence (5′~3′) | (bp) | NO: |
| CMV 2b | taatacgactcactatagggtatgtaattgaacgtaggtgcaat | 300 bp | 174 |
| dsRNA F | | | |
| CMV 2b | taatacgactcactatagggaaccaatctgtatogtcaaaatc | | 175 |
| dsRNA R | | | |
| GFP dsRNA_F | taatacgactcactatagggggcacaagctggagtacaa | 339 bp | 176 |
| GFP dsRNA_R | taatacgactcactatagggtctcgttggggtctttgctc | | 177 |
| BtGAP | taatacgactcactatagggtctacggagacgctgaataagc | 294 bp | 178 |
| dsRNA_F | | | |
| BIGAP | taatacgactcactatagggagacctttcaccatcgct | | 179 |
| dsRNA_R | | | |
| BtTreT | taatacgactcactatagggattccactcttggccatctg | 151 bp | 180 |
| dsRNA_F | | | |
| BtTreT | taatacgactcactatagggatctcctcgttgaccacctg | | 181 |
| dsRNA_R | | | |
| BtCOPB1 | taatacgactcactatagggcatcttggaaagtcgggctt | 252 bp | 182 |
| dsRNA_F | | | |
| BtCOPB1 | taatacgactcactatagggagttgatggggtcatcggtt | | 183 |
| dsRNA_R | | | |
| BtAIGluc | taatacgactcactatagggaatggcgagaccaagaattg | 312 bp | 184 |
| dsRNA_F | | | |
| BtAlGluc | taatacgactcactatagggcctggattgccttttggtaa | | 185 |
| dsRNA_R | | | |
| BtCHM4C | taatacgactcactatagggcacatggatgttgatcaagtgc | 258 bp | 186 |
| dsRNA_F | | | |
| BtCHM4C | taatacgactcactatagggcttgccacttgatttatctgcc | | 187 |
| dsRNA_R | | | |
| BtATP | taatacgactcactatagggtggagctctcagtagagcat | 163 bp | 188 |
| synthase | | | |
| dsRNA_F | | | |
| BtATP | taatacgactcactatagggttagtggtacttcctatagat | | 189 |
| synthase | | | |
| dsRNA_R | | | |
| BtN2B | taatacgactcactatagggcaacgtttgcagaactctgtg | 302 bp | 190 |
| dsRNA_F | | | |
| BtN2B | taatacgactcactatagggggctacggcattttcggatt | | 191 |
| dsRNA_R | | | |
| BtRieske | taatacgactcactatagggattgatcgttctttgctca | 188 bp | 192 |
| dsRNA_F | | | |
| BtRieske | taatacgactcactataggggacttgtcattgtcagaggt | | 193 |
| dsRNA_R | | | |
| BtAChE1 | taatacgactcactatagggccaagtttatcatcagacgga | 240 bp | 194 |
| dsRNA_F | | | |
| BtAChE1 | taatacgactcactatagggcccatgttgaaggagagaac | | 195 |
| dsRNA_R | | | |
| BtTreH | taatacgactcactatagggaaatctcccggttctggagt | 151 bp | 196 |
| dsRNA_F | | | |
| BtTreH | taatacgactcactatagggcagggtgaaatcctccttga | | 197 |
| dsRNA_R | | | |
| BtAqp1 | taatacgactcactatagggaaatcacgccaaaaacaggt | 200 bp | 198 |
| dsRNA_F | | | |
| BtAqp1 | taatacgactcactatagggagcaattgcgaatcctatcg | | 199 |
| dsRNA_R | | | |
| BtV-ATPase A | taatacgactcactatagggcagaactgaagtatgtgttgg | 212 bp | 200 |
| dsRNA_F | | | |
| BtV-ATPase A | taatacgactcactatagggcattctctcaaacgctggca | | 201 |
| dsRNA_R | | | |
| BtZFP | taatacgactcactatagggaacacagtgaccggtgcaa | 254 bp | 202 |
| dsRNA_F | | | |
| BtZFP | taatacgactcactataggggctggtcctgaagactatccat | | 203 |
| dsRNA_R | | | |
| BtGD | taatacgactcactatagggtgctcttggtggcttgactt | 270 bp | 204 |
| dsRNA_F | | | |
| BtGD | taatacgactcactatagggtacagcgtgtcttcgatccg | | 205 |
| dsRNA_R | | | |
| BtMYO | taatacgactcactatagggtgttcacccagactcaggtc | 298 bp | 206 |
| dsRNA_F | | | |
| BtMYO | taatacgactcactatagggtgcctcagagcttttccgtt | | 207 |
| dsRNA_R | | | |
| BtTryp_SPc | taatacgactcactataggggtcagaaaacgtcaagcgca | 279 bp | 208 |
| dsRNA_F | | | |
| BtTryp_SPc | taatacgactcactatagggatttgattgcgcgctgttga | | 209 |
| dsRNA_R | | | |
| BtDUOX | taatacgactcactatagggatggccagtgagagtggttg | 301 bp | 210 |
| dsRNA_F | | | |
| BtDUOX | taatacgactcactataggggcatggtatttcgaacgggc | | 211 |
| dsRNA_R | | | |
| BtPNLIPRP2 | taatacgactcactatagggtattctgagaccagtggcgc | 276 bp | 212 |
| dsRNA_F | | | |
| BtPNLIPRP2 | taatacgactcactataggggaccctgatccccaatccac | | 213 |
| dsRNA_R | | | |
| BtSUC | taatacgactcactatagggatgagcgaatggacatacat | 271 bp | 214 |
| dsRNA_F | | | |
| BtSUC | taatacgactcactataggggcaagctactgccggaattg | | 215 |
| dsRNA_R | | | |
| BtGTF | taatacgactcactatagggcagataattgtggcgcaccg | 302 bp | 216 |
| dsRNA_F | | | |
| BIGTF | taatacgactcactataggggggtaggaagcattgggtga | | 217 |
| dsRNA_R | | | |
| BtrBAT | taatacgactcactatagggatcatacgaacgtggaggcc | 294 bp | 218 |
| dsRNA_F | | | |
| BtrBAT | taatacgactcactatagggtgtccccaattttgaggcga | | 219 |
| dsRNA_R | | | |
| BLVDAC | taatacgactcactataggggaggtgagctggaacgccac | 299 bp | 220 |
| dsRNA_F | | | |
| BLVDAC | taatacgactcactatagggcactttcacgccgccggtca | | 221 |
| dsRNA_R | | | |
| BtCYP450 | taatacgactcactatagggatggtttacctgctctacg | 249 bp | 222 |
| dsRNA_F | | | |
| BtCYP450 | taatacgactcactatagggcttgactaggacgatcctgg | | 223 |
| dsRNA_R | | | |
| BtaATPase C | taatacgactcactataggggttggtagttgttccaaggg | 304 bp | 224 |
| dsRNA_F | | | |
| BtaATPase C | taatacgactcactataggggttaactttcaaccaccgaacc | | 225 |
| dsRNA_R | | | |
| BtaATPase E2 | taatacgactcactatagggccggatottcgtcaacaacc | 172 bp | 226 |
| dsRNA_F | | | |
| BtaATPase E2 | taatacgactcactatagggcggaaaactcagaaagtcggtc | | 227 |
| dsRNA_R | | | |
| BtaGABA4 | taatacgactcactatagggcgaaaatttccgctcgacacac | 152 bp | 228 |
| dsRNA_F | | | |
| BtaGABA4 | taatacgactcactataggggttgcgattaaactgtgttgagc | | 229 |
| dsRNA_R | | | |
| BtaGABA6 | taatacgactcactatagggggcagaaccactctaggtgt | 145 bp | 230 |
| dsRNA_F | | | |
| BtaGABA6 | taatacgactcactataggggtagagcgcaaaatacgaacgc | | 231 |
| dsRNA_R | | | |
| BtaCICP | taatacgactcactataggggtaatgaccagcttgataacg | 186 bp | 232 |
| dsRNA_F | | | |
| BtaCICP | taatacgactcactatagggtatcgccaggaaagcgagt | | 233 |
| dsRNA_R | | | |
| BtaGluR1 | taatacgactcactatagggctagcaggttggacatggc | 205 bp | 23 |
| dsRNA_F | | | |
| BtaGluR1 | taatacgactcactataggggagttctcctcgtagccgt | | 235 |
| dsRNA_R | | | |
| BtaCHM2b | taatacgactcactatagggtgagtctggagatgaagagg | 191 bp | 236 |
| dsRNA_F | | | |
| BtaCHM2b | taatacgactcactatagggagggcgtctttaataatttagc | | 237 |
| dsRNA_R | | | |
| BtaCMB7 | taatacgactcactataggggtcggtagatgaattcttgcaa | 227 bp | 238 |
| dsRNA_F | | | |
| BtaCMB7 | taatacgactcactatagggcgtagagatgatcaaattcgac | | 239 |
| dsRNA_R | | | |
| BtaSNF8 | taatacgactcactataggggaacaaacggcagtgctga | 216 bp | 240 |
| dsRNA_F | | | |
| BtaSNF8 | taatacgactcactatagggggagacaccatcactcacaca | | 241 |
| dsRNA_R | | | |
| BtaCHM6A | taatacgactcactatagggcattcagtgacactgacatgg | 192 bp | 242 |
| dsRNA_F | | | |
| BtaCHM6A | taatacgactcactataggggcttcttgctgtccttgact | | 243 |
| dsRNA_R | | | |
| BtaCHM3 | taatacgactcactatagggggatgaaaccatggactcag | 221 bp | 244 |
| dsRNA_F | | | |
| BtaCHM3 | taatacgactcactatagggcttgcaatcggttctgcat | | 245 |
| dsRNA_R | | | |
| BtaCOPG | taatacgactcactataggggttcggtttatgtactactca | 231 bp | 246 |
| dsRNA_F | | | |
| BtaCOPG | taatacgactcactataggggataaccttcatctgtgtcag | | 247 |
| dsRNA_R | | | |
| BtalAP | taatacgactcactatagggtggccaccttattcttcgc | 383 bp | 248 |
| dsRNA_F | | | |
| BtalAP | taatacgactcactatagggcgttgaaagcaaatggtgc | | 249 |
| dsRNA_R | | | |
| BtaBur | taatacgactcactatagggtagtttggtggctgtgtctc | 169 bp | 250 |
| dsRNA_F | | | |
| BtaBur | taatacgactcactatagggtaactggaacaacgaccgg | | 251 |
| dsRNA_R | | | |
| BtaSALP | taatacgactcactatagggttgtgtgaagaggtacacgg | 177 bp | 252 |
| dsRNA_F | | | |
| BtaSALP | taatacgactcactatagggagatgcctgtaatgcctgc | | 253 |
| dsRNA_R | | | |
| BtaTPS | taatacgactcactataggggttggatggccaggaattca | 200 bp | 254 |
| dsRNA_F | | | |
| BtaTPS | taatacgactcactataggggttctatccggcattgagtg | | 255 |
| dsRNA_R | | | |
| BtaFHBP | taatacgactcactatagggatgttcgagaacggctcctt | 282 bp | 256 |
| dsRNA_F | | | |
| BtaFHBP | taatacgactcactatagggatattgcgggctgaaaagcg | | 257 |
| dsRNA_R | | | |
| BtaChorion | taatacgactcactataggggaagcagttctcgccgaatc | 325 bp | 258 |
| dsRNA_F | | | |
| BtaChorion | taatacgactcactatagggcgcaggatacgtcgtcatca | | 259 |
| dsRNA_R | | | |
| BtaAmy | taatacgactcactatagggaccagctcgtttaaagcctca | 296 bp | 260 |
| dsRNA_F | | | |
| BtaAmy | taatacgactcactatagggggaaagcctggtcgaggtaa | | 261 |
| dsRNA_R | | | |
| BtaCytoc | taatacgactcactatagggggcgatggaaggacgatgat | 252 bp | 262 |
| dsRNA_F | | | |
| BtaCytoc | taatacgactcactatagggtcccatttcggtctatgatcca | | 263 |
| dsRNA_R | | | |
| BtaSurfeit | taatacgactcactatagggacttccagtggacacagcaa | 273 bp | 264 |
| dsRNA_F | | | |
| BtaSurfeit | taatacgactcactatagggctttgctgtcagccagaacg | | 265 |
| dsRNA_R | | | |
| BtaNAT15 | taatacgactcactatagggcagaaagcgtacgacgaagc | 270 bp | 266 |
| dsRNA_F | | | |
| BtaNAT15 | taatacgactcactatagggcgcatgagcatggggatact | | 267 |
| dsRNA_R | | | |
| BtaEH | taatacgactcactatagggcgttgatgtggtcccttgga | 256 bp | 268 |
| dsRNA_F | | | |
| BtaEH | taatacgactcactataggggttggcatttgtccacccaa | | 269 |
| dsRNA_R | | | |
| BtaZFP76 | taatacgactcactatagggggacggcaatgtcgaaatgg | 254 bp | 270 |
| dsRNA_F | | | |
| BtaZFP76 | taatacgactcactataggggcatcgctgtttccactagt | | 271 |
| dsRNA_R | | | |
| BtaCleavage | taatacgactcactatagggtcctgaacctgttcccttgc | 276 bp | 272 |
| dsRNA_F | | | |
| BtaCleavage | taatacgactcactatagggttagttgagcaacggcagga | | 273 |
| dsRNA_R | | | |
| BtaSyntax | taatacgactcactatagggctgcatattccagcaaccgc | 255 bp | 274 |
| dsRNA_F | | | |
| BtaSyntax | taatacgactcactataggggaaccggtgaaacgcaatca | | 275 |
| dsRNA_R | | | |
| Bta_Dyn | taatacgactcactatagggcgatgagagtgggaatcgca | 254 bp | 276 |
| dsRNA_F | | | |
| Bta_Dyn | taatacgactcactatagggtagcggatttggcctcagac | | 277 |
| dsRNA_R | | | |
| BtaProteosome | taatacgactcactatagggttgccgtcaaccatttgtcg | 291 bp | 278 |
| dsRNA_F | | | |
| BtaProteosome | taatacgactcactataggggcaacttccatctgaacggg | | 279 |
| dsRNA_R | | | |
| BtaCd6 | taatacgactcactataggggcgttgcttcccttgacaaa | 250 bp | 280 |
| dsRNA_F | | | |
| BtaCd6 | taatacgactcactatagggaaatcgacaccaccaagcct | | 281 |
| dsRNA_R | | | |
| BtaU5 | taatacgactcactataggggcactgaagcagagcaagtc | 293 bp | 282 |
| dsRNA_F | | | |
| BtaU5 | taatacgactcactatagggttgaggtcttccagcacgtc | | 283 |
| dsRNA_R | | | |
| BtaMediator | taatacgactcactatagggagagttgcgggacctgattt | 300 bp | 284 |
| dsRNA_F | | | |
| BtaMediator | taatacgactcactatagggggcccacctaagttttccca | | 285 |
| dsRNA_R | | | |
| BtaExp2 | taatacgactcactataggggctgcttgcactatcgaaaa | 266 bp | 286 |
| dsRNA_F | | | |
| BtaExp2 | taatacgactcactatagggggatttttggccacggcttt | | 287 |
| dsRNA_R | | | |
| BtacAMP | taatacgactcactatagggaactgtggggcattgatcgt | 290 bp | 288 |
| dsRNA_F | | | |
| BtacAMP | taatacgactcactatagggtaggcgaccaacttctacgg | | 289 |
| dsRNA_R | | | |
| BtaATPbind | taatacgactcactatagggccggccaaaaaccactcttc | 300 bp | 290 |
| dsRNA_F | | | |
| BtaATPbind | taatacgactcactatagggcatgtgacgccagaccaaac | | 291 |
| dsRNA_R | | | |
| BtaTre | taatacgactcactatagggggaacacgaggaccgctatt | 311 bp | 292 |
| dsRNA_F | | | |
| BtaTre | taatacgactcactatagggtgacctgtagattggcacgg | | 293 |
| dsRNA_R | | | |
| BtaZFP26 | taatacgactcactatagggagccagaagtgtggtaagcc | 332 bp | 294 |
| dsRNA_F | | | |
| BtaZFP26 | taatacgactcactatagggtctttgaacgtcttggggca | | 295 |
| dsRNA_R | | | |
| BtaKelch8 | taatacgactcactatagggccaatgcacgagccaagatc | 279 bp | 296 |
| dsRNA_F | | | |
| BtaKelch8 | taatacgactcactatagggactgtgccatcggtctgtta | | 297 |
| dsRNA_R | | | |
| BtaTre | taatacgactcactatagggatggtttgactgggacctgg | 251 bp | 298 |
| dsRNA_F | | | |
| BtaTre | taatacgactcactatagggttgcttgtaaaggtgcccac | | 299 |
| dsRNA_R | | | |
| BtaRRP42 | taatacgactcactatagggccaaaacaagcgtgctggaa | 274 bp | 300 |
| dsRNA_F | | | |
| BtaRRP42 | taatacgactcactatagggcctcttctgcagttggatcca | | 301 |
| dsRNA_R | | | |
| BtaKelch4 | taatacgactcactataggggctttggatgtttggtgggg | 262 bp | 302 |
| dsRNA_F | | | |
| BtaKelch4 | taatacgactcactataggggctgtagccgccgtagataa | | 303 |
| dsRNA_R | | | |
| BtaStill | taatacgactcactatagggtcagtggatgggatagggtgt | 265 bp | 304 |
| dsRNA_F | | | |
| BtaStill | taatacgactcactatagggaaaggcggcttgtaggtgaa | | 305 |
| dsRNA_R | | | |
| BtaKappaB | taatacgactcactatagggtgtgtccacgactgtccaag | 266 bp | 306 |
| dsRNA_F | | | |
| BtaKappaB | taatacgactcactatagggtgacccttgactgaccctct | | 307 |
| dsRNA_R | | | |
| BtaNFkappa | taatacgactcactatagggacacccgaatctaaccaccg | 263 bp | 308 |
| dsRNA_F | | | |
| BtaNFkappa | taatacgactcactatagggaaacccgcgttttcagtgtc | | 309 |
| dsRNA_R | | | |
| BtaATPaseAA | taatacgactcactatagggttgaaaggcgagcaactagc | 278 bp | 310 |
| A dsRNA_F | | | |
| BtaATPaseAA | taatacgactcactatagggacaaattctgcgtctccgga | | 311 |
| A dsRNA_R | | | |
| BtaExp4 | taatacgactcactataggggttcctggagctgaacactct | 263 bp | 312 |
| dsRNA_F | | | |
| BtaExp4 | taatacgactcactatagggaaattgacaacccagcgtgc | | 313 |
| dsRNA_R | | | |
| BtaSyntaxin | taatacgactcactatagggtggtcgctcacagtttacct | 311 bp | 314 |
| dsRNA_F | | | |
| BtaSyntaxin | taatacgactcactatagggtggagcttcaggcatttcgt | | 315 |
| dsRNA_R | | | |
| BtaNAT | taatacgactcactatagggcagaaagcgtacgacgaagc | 270 bp | 316 |
| dsRNA_F | | | |
| BtaNAT | taatacgactcactatagggcgcatgagcatggggatact | | 317 |
| dsRNA_R | | | |
| BtaSec31A | taatacgactcactataggggtgatgttgcggcttcttcc | 264 bp | 318 |
| dsRNA_F | | | |
| BtaSec31A | taatacgactcactatagggcttgcggctgataagttggc | | 319 |
| dsRNA_R | | | |
| BtaCysGly | taatacgactcactatagggtggaaaacccaaaatgcccg | 250 bp | 320 |
| dsRNA_F | | | |
| BtaCysGly | taatacgactcactatagggaagtgttcaccggtgtccat | | 321 |
| dsRNA_R | | | |
| BtaTPS3 | taatacgactcactatagggggagtgtggagtgagagcag | 261 bp | 322 |
| dsRNA_F | | | |
| BtaTPS3 | taatacgactcactataggggacaagtggtgtttgccgac | | 323 |
| dsRNA_R | | | |
| BtaGD | taatacgactcactataggggggagacacaaaccgggtat | 256 bp | 324 |
| dsRNA_F | | | |
| BtaGD | taatacgactcactatagggggtgaaccaattgagcctgc | | 325 |
| dsRNA_R | | | |
| BtaG6PD | taatacgactcactatagggcccgaagagcagatctaccg | 256 bp | 326 |
| dsRNA_F | | | |
| BtaG6PD | taatacgactcactatagggcaggtttctccatggccact | | 327 |
| dsRNA_R | | | |
| BtaFABP | taatacgactcactatagggcatccgccaaacaagacacc | 252 bp | 328 |
| dsRNA_F | | | |
| BtaFABP | taatacgactcactataggggcgtctcttcgtcgaactct | | 329 |
| dsRNA_R | | | |
| BtaJHIP | taatacgactcactatagggccttgcgtccaaagagaacg | 262 bp | 330 |
| dsRNA_F | | | |
| BtaJHIP | taatacgactcactatagggcaacaccgtcgattgatgca | | 331 |
| dsRNA_R | | | |
| BtaVit | taatacgactcactatagggaggaatgtgtgcactgagct | 264 bp | 332 |
| dsRNA_F | | | |
| BtaVit | taatacgactcactatagggtacatcgcgttgggcatgta | | 333 |
| dsRNA_R | | | |
| BtaDC | taatacgactcactatagggtgcacagaactcgaggttgt | 251 bp | 334 |
| dsRNA_F | | | |
| BtaDC | taatacgactcactataggggaggagtgggcttgtttgga | | 335 |
| dsRNA_R | | | |
| BtaRas | taatacgactcactatagggtgtggatactgcgggacaag | 288 bp | 336 |
| dsRNA_F | | | |
| BtaRas | taatacgactcactatagggtcgttttgctttgcagaggc | | 337 |
| dsRNA_R | | | |
| BtaJHEH1 | taatacgactcactatagggaccagacacagttgggacag | 282 bp | 338 |
| dsRNA_F | | | |
| BtaJHEH1 | taatacgactcactatagggtgtgcacagacggtaggaac | | 339 |
| dsRNA_R | | | |
| BtaJHEH2 | taatacgactcactatagggtactgctgcatagttggcct | 295 bp | 340 |
| dsRNA_F | | | |
| BtaJHEH2 | taatacgactcactatagggagccctaggtcattttcggg | | 341 |
| dsRNA_R | | | |
| BtaJHEBP | taatacgactcactatagggaggggttctatcgctcaacc | 320 bp | 342 |
| dsRNA_F | | | |
| BtaJHEBP | taatacgactcactatagggctggcgcatacaatctgcac | | 343 |
| dsRNA_R | | | |
| BtaAllato | taatacgactcactataggggggttgtttgtgacggtgc | 250 bp | 344 |
| dsRNA_F | | | |
| BtaAllato | taatacgactcactatagggtcacagagttatcatcgtccaca | | 345 |
| dsRNA_R | | | |
| BtaMtor | taatacgactcactatagggtcactgacactgatgccgat | 250 bp | 346 |
| dsRNA_F | | | |
| BtaMtor | taatacgactcactatagggcccaagccactgtgttcaac | | 347 |
| dsRNA_R | | | |
| BtaS6K | taatacgactcactatagggggctcctctcctgaagatgg | 272 bp | 348 |
| dsRNA_F | | | |
| BtaS6K | taatacgactcactatagggacccgaggcctgtacatttc | | 349 |
| dsRNA_R | | | |
| BtaAqp12 | taatacgactcactatagggatggcatcttagcgtacgca | 265 bp | 350 |
| dsRNA_F | | | |
| BtaAqp12 | taatacgactcactatagggacctgtaaatctgccgtgca | | 351 |
| dsRNA_R | | | |
| BtaT6PS | taatacgactcactatagggcaaaccgtttccagcttggg | 271 bp | 352 |
| dsRNA_F | | | |
| BtaT6PS | taatacgactcactatagggggacacaatacccgggtctc | | 353 |
| dsRNA_R | | | |
| BtarBAT | taatacgactcactatagggatcatacgaacgtggaggcc | 294 bp | 354 |
| dsRNA_F | | | |
| BtarBAT | taatacgactcactatagggtgtccccaattttgaggcga | | 355 |
| dsRNA_R | | | |
| BtaAGluc1 | taatacgactcactatagggtgctcggaaatcacgaccaa | 274 bp | 356 |
| dsRNA_F | | | |
| BtaAGluc1 | taatacgactcactataggggggttcgtcgaaaatcctgc | | 357 |
| dsRNA_R | | | |
| BtaAGluc2 | taatacgactcactatagggtccgcttctggatggacatg | 290 bp | 358 |
| dsRNA_F | | | |
| BtaAGluc2 | taatacgactcactataggggtagcgcatcttctcgtcc | | 359 |
| dsRNA_R | | | |
| BtaAGluc3 | taatacgactcactatagggcgataaaccgagagctgcct | 330 bp | 360 |
| dsRNA_F | | | |
| BtaAGluc3 | taatacgactcactatagggttggggcttttctcctgctt | | 36 |
| dsRNA_R | | | |
| BtaAGluc4 | taatacgactcactatagggagtgtgtactacgggaccga | 261 bp | 362 |
| dsRNA_F | | | |
| BtaAGluc4 | taatacgactcactatagggtctgttggaattttctgctc | | 363 |
| dsRNA_R | | | |
| BtaAGluc5 | taatacgactcactatagggactaccgcaatccgagagtg | 303 bp | 364 |
| dsRNA_F | | | |
| BtaAGluc5 | taatacgactcactatagggctgcatcgccgaggtaatct | | 365 |
| dsRNA_R | | | |
| BtaGTF | taatacgactcactatagggtgaagttggagcccttcacc | 292 bp | 366 |
| dsRNA_F | | | |
| BtaGTF | taatacgactcactatagggagccagtggtacaggaaacg | | 367 |
| dsRNA_R | | | |
| BtaNuc1 | taatacgactcactatagggtcatctctctcgccccgat | 274 bp | 368 |
| dsRNA_F | | | |
| BtaNuc1 | taatacgactcactatagggtctgcagcattctcggttgt | | 369 |
| dsRNA_R | | | |
| BtaNuc2 | taatacgactcactatagggcggttacagcttaaagccgc | 311 bp | 370 |
| dsRNA_F | | | |
| BtaNuc2 | taatacgactcactatagggtagtaaagctggcgtcacctc | | 371 |
| dsRNA_R | | | |
| BtaConstructI | taatacgactcactatagggcagaactgaagtatgtgttgg | 467 bp | 372 |
| dsRNA_F | | | |
| BtaConstructI | taatacgactcactataggggctggtcctgaagactatcca | | 373 |
| dsRNA_R | | | |
| BtaConstructII | taatacgactcactatagggccaagtttatcatcagacgga | 452 bp | 374 |
| dsRNA_F | | | |
| BtaConstructII | taatacgactcactatagggcattctctcaaacgctggcac | | 375 |
| dsRNA_R | | | |

### Artificial Diet Screening Bioassays

[0432] Diet feeding bioassays were performed to screen potential target genes in B. tabaci. Adult whiteflies (n=20) were collected from a lab colony using a vacuum aspirator and transferred to a petri-dish covered with a layer of parafilm M (Pechiney Plastic Packaging, IL, USA). An artificial diet comprised of 30% sucrose solution mixed with nuclease-free water or 200 ng/μl of target or GFP dsRNA was placed on the first layer of stretched parafilm. The second layer was stretched to cover the sucrose droplet without the formation of air bubble or spillage. Sucrose containing dsRNA solutions were fed to adult whiteflies for 6 consecutive days without replacing diet, and mortality was recorded. Sucrose and GFP dsRNA were used as controls in each feeding assay. The petri-dishes were kept in growth chamber at 25±2° C., 65±5% relative humidity and 16 h light: 8 h dark photoperiod. Experiments were repeated two to three times using 3 biological replicates with 75 adults per replicate; those with significant whitefly mortality were selected for further experiments and gene knockdown analysis.

[0433] Cotton pad soaking bioassays were performed to determine whether the B. tabaci specific target dsRNA has no undesirable effects on beneficial and non-target organisms, the Australian native stingless bee Tetragonula hockingsi. 30 adult bees were placed into a wooden box (10 cm*10 cm) and allowed to feed on sucrose (50%) solution mixed with nuclease-free water or Syntaxin dsRNA (200 ng/μl) soaked cotton pads. Cotton pads were changed every two days. The mortality of bees was calculated after 6 days. The wooden boxes were kept in growth chamber at 28±1° C., 50±5% relative humidity and 16 h light: 8 h dark photoperiod. Experiments were repeated two times using a 3 biological replicates with 30 bees per replicate.

Combination and Stacking of Target dsRNAs

[0434] Three target dsRNAs targeting vATPase A, AchE1 and ZFP were selected based on high mortality in screening bioassays and tested through mixing of RNAi approach. The target dsRNAs were mixed with sucrose 30% solution to a final concentration of 200 ng/μl (100 ng/μl of each dsRNA). Sucrose and GFP dsRNA were used as negative controls. Three biological replicates with 75 adult whiteflies per replicate were used in each assay.

[0435] Three stacked constructs (i) v-ATPase A and ZFP (467 bp) (ii) v-ATPase A and AchE1 (452 bp) and (iii) v-ATPase A, AchE1 and ZFP (707 bp) and mixture of two corresponding individual dsRNAs at a final concentration of 200 ng/μl were fed to whiteflies via artificial diet and mortality were observed up to six days.

dsRNA Loading on LDH

[0436] Before conducting insectary trials, a loading profile for each BioClay was performed to determine the ratio at which naked dsRNA is completely integrated with the LDH. Briefly, 500 ng of target in-vitro transcribed dsRNA were combined with varying amounts of LDH (loading from 1:1 to 1:6) and then incubated at room temperature for twenty minutes to allow loading of dsRNA onto the LDH. Complete dsRNA loading onto LDH was confirmed when the dsRNA-LDH remains visible in the well and unable to migrate through the 1% agarose gel. For diet feeding bioassays and insectary trials, appropriate loading ratios were selected with small amount of free dsRNA as it should be immediately available for triggering RNAi response in developmental stages of whitefly from the moment of foliar spray application.

### Confocal Microscopy—Plants

[0437] For confocal microscopy experiments, CMV2b-dsRNA was synthesized and labeled with Cy3 fluorophore (GE Healthcare, USA) using HiScribe T7 transcription kit (NEB, USA) as per the manufacturer's instructions. Cotton (Sicot-620) plants were grown in glasshouse at 25° C. (16 h: 8 h, light: day) for up to 4 weeks before being used for experiments.

[0438] To investigate whether incorporation of a penetrant to the dsRNA solution could enhance the uptake and internalization of dsRNA in plants, four-week-old cotton plants were treated with 5 μl droplets of 500 ng of CMV2b-dsRNA-Cy3, CMV2b-dsRNA-Cy3-banjo penetrant (0.05%), CMV2b-dsRNA-Cy3-pulse penetrant (0.01%), CMV2b-dsRNA-Cy3-supercharge elite penetrant (0.05%), and Cy3 only in replicates of two and incubated for 2 hours at room temperature in the dark.

[0439] To determine the translaminar movement of dsRNA within the cotton leaf, four-week-old cotton plants in replicates of two were applied with 5 μl droplets of Cy3 only, CMV2b-dsRNA-Cy3 (500 ng), CMV2b-dsRNA-Cy3-Banjo penetrant (0.05%), CMV2b-dsRNA-Cy3-Pulse penetrant (0.01%), and CMV2b-dsRNA-Cy3-Supercharge Elite penetrant (0.01%) onto the adaxial (upper) leaf surface. Plants were incubated for 24 hours at room temperature in the dark before being visualized under a confocal microscope from the adaxial and abaxial (lower) surfaces.

[0440] To detect the uptake of LDH released dsRNA in the cotton plants, 5 μl droplets of Cy3 only, CMV2b dsRNA-Cy3-Banjo penetrant (0.05%) (500 ng), and CMV2b-dsRNA-Cy3-LDH-Banjo penetrant (0.05%, 1:4) only were applied on cotton plants and incubated for 72 hours at room temperature in the dark.

[0441] After incubation, treated cotton leaves were washed by rinsing cotton leaf three times with Milli-Q water by vigorous pipetting. Confocal images were collected on a Leica Microsystems SP8 system (Leica, Wetzlar, Germany), excited with a tuneable white light laser and detected with HyD detectors. Leaf autofluorescence was characterized by varying the excitation laser, followed by detecting 20 nm bands for the full range of the HyD detector at different excitation laser settings. The leaf produced autofluorescence in the range of Cy3, and in the far-red region of the spectrum. Cy3 was collected Ex: 555 nm Em: 565-650 nm, leaf autofluorescence for structural information was collected Ex: 660 nm Em: 673-720 nm. Fluorescence lifetime imaging microscopy (FLIM: SP8 FALCON: a novel concept in fluorescence lifetime imaging enabling video-rate confocal FLIM. Alvarez, L. A. J et. al, Nature Methods, 2019. https://www.nature.com/articles/d42473-019-00261-x) was performed at 80 MHz to distinguish the autofluorescence from the leaf from the Cy3 fluorescence signal. Data was collected on leaf only, Cy3 only, and Cy3 dsRNA as microscopy controls. Data was collected to obtain a minimum of 100 photons per pixel to ensure reliable modelling of the fluorescence decay. Data was then analysed using the FLIMfit software tool developed at Imperial College London. The modelling parameters were used in a Matlab analysis package developed at the Institute for Molecular Bioscience, UQ to analyse the data and produce images of leaves with Cy3 labelled naked dsRNA or BioClay treatments void of autofluorescence. Z-stacks were used to verify that the fluorescence signal is inside the leaf and to measure the distance of Cy3 movement in the leaf.

### Confocal Microscopy—Whitefly

Artificial Diet-Mediated Uptake of dsRNA

[0442] To detect the uptake of dsRNA in adult whitefly through artificial diet, an artificial diet comprised 30% sucrose solution mixed with nuclease-free water or 100 ng/μl of Cy3-labeled GFP dsRNA was placed on the first layer of stretched parafilm. The second layer was stretched to cover the sucrose droplet without the formation of air bubble or spillage. The petri-dishes were wrapped in aluminium foil to avoid exposure to direct light and kept in a growth chamber at 25° C. (16 h: 8 h, light: day). After 24 hours, whiteflies were then harvested in liquid nitrogen (LN) and visualised under a confocal microscope.

Detached Leaf and Plant-Mediated Uptake of dsRNA

[0443] To determine the ability of adult whitefly to take up dsRNA from the detached cotton leaves, 500 μL of 50 ng/μl Cy3-CMV2b dsRNA or nuclease-free water (negative control) were added to a 1.5 ml micro-centrifuge tube and leaf petioles were then transferred into the tubes. After 24 hours, sixty adult whiteflies were transferred onto detached cotton leaves in 3 replicates (n=20 in 1 replicate) and allowed to feed for a further 48 hours. Whiteflies were then harvested and visualized under confocal microscope.

[0444] To investigate the uptake of dsRNA in whitefly from intact cotton plants, 50 μL of 100 ng/μl Cy3-labelled CMV2b dsRNA-Banjo penetrant (0.05%) or nuclease-free water (negative control) were pipetted on adaxial (upper) or abaxial (lower) surface of cotton leaves and allowed to dry for 24 hours. After 24 hours, sixty adult whiteflies (n=20 in 1 replicate) were transferred into the clip cages and allowed to feed on abaxial (lower) surface of three cotton plants for a further 48 hours. Whiteflies were then harvested in liquid nitrogen (LN) before being visualized under a confocal microscope.

Gene Expression Analysis by Quantitative Real-Time PCR (qRT-PCR)

[0445] For gene knockdown analysis, adult whiteflies (n=30) were collected in three biological replicates after four days of dsRNA ingestion, and RNA was extracted using TRIsure™ Reagent (Bioline, Australia). Quantitative real-time PCR (qRT-PCR) was performed using the SensiFAST SYBR No-ROX One-Step kit (Bioline, UK) as per manufacturer's instructions on a Rotor-Gene Q platform (QIAGEN, Netherland). The 20 μl qRT-PCR reaction was set up with 1× SensiFAST SYBR No-ROX one-step mix, 400 nM primers, reverse transcriptase, RiboSafe RNase Inhibitor, and 10 ng of total RNA. The thermocycler conditions were 45° C. for 10 min, 95° C. for 2 min, then 40 cycles at 95° C. for 5 s, 60° C. for 10 s, and 72° C. for 5 s. A melt-curve analysis was performed following end of each amplification run to confirm the specificity of the target PCR products. Reactions were run in two replicates and 50S ribosomal protein L6 (rpl6) (GeneBank accession number: XM_019058924.1) was used for transcript normalization. Relative expression levels were determined using the ΔΔCT method20. All the primers used in gene expression analysis were designed to avoid the target region used in the synthesis of dsRNA (Table 2).

TABLE 2
Sequences of primers used for qRT-PCR analysis

| | | Amplicon | SEQ |
|---|---|---|---|
| | | length | ID |
| Primer name | Sequence (5′~3′) | (bp) | NO: |
| RPL29_qRT_F | agaccaccgcaatggtatc | 142 bp | 376 |
| RPL29_qRT_R | ggacttcattctggcgtactg | | 377 |
| BtCOPB1 dsRNA_F | aaaagccccacctatcgttg | 150 bp | 378 |
| BtCOPB1 dsRNA_R | cactaaggttgccagctacag | | 379 |
| BtCHM4C dsRNA_F | gccaataccaacacagctgtat | 245 bp | 380 |
| BtCHM4C dsRNA_R | ggcctcagagatttccttagc | | 381 |
| BtAChE1 dsRNA_F | caactacatcttcggcgagc | 151 bp | 382 |
| BtAChE1 dsRNA_R | gtacacggatgcccaacttc | | 383 |
| BtTreH_qRT_F | cgcctactatcagctcaaacag | 155 bp | 384 |
| BtTreH_qRT_R | cgcacgtttcgacactgtaa | | 385 |
| BtAqp1_qRT_F | agccatctgtggagcaatcat | 196 bp | 386 |
| BtAqp1_qRT_R | ctttgatgtcggtccgctt | | 387 |
| BtV-ATPase A | gcccgcgagatcactcaact | 212 bp | 388 |
| dsRNA_F | | | |
| BtV-ATPase A | gtgagcgagtcgttgttgc | | 389 |
| dsRNA_R | | | |
| BtZFP dsRNA_F | gcatagacagcaagcacagc | 154 bp | 390 |
| BtZFP dsRNA_R | aggtccagagcctccaactc | | 391 |

### Plant-Based Insectary Trials

[0446] To evaluate the effects of target dsRNAs and dsRNA-LDH (BioClay) on whitefly eggs and nymphs, plant-based insectary trials were performed. Insectary trials consist of three cotton plants (with six leaves per treatment group) and includes water, LDH, and CMV2b-dsRNA (non-specific dsRNA targeting CMV strain 207) as controls. The workflow of insectary trial involved transferring 20 male and 20 female adult whiteflies (age irrelevant) collected in a glass vial using a vacuum aspirator into clip cages attached to the expanded leaves of 4-6-week-old cotton plants. The whitefly then deposited eggs (oviposition) for 24 hours. The adult whiteflies were then removed using an aspirator. Leaves sprayed with water, LDH only, CMV2b-dsRNA, target dsRNA and/or dsRNA-LDH (BioClay)-Ammonium sulfate (10 mM) post 1 and 10 days of eggs infestation and allowed to air dry. Plants were sprayed with approximately 1 ml of 0.5 μg/μl of dsRNA and/or 1.5 μg/μl of LDH unless specified. naked dsRNA and LDH-dsRNA (loading ratio 1:3) unless specified. The plants were then maintained in insect cages in a controlled insectary (at 25±1° C., photoperiod of 16:8 hr (Light:Dark), and RH 50%) for 17 days until whitefly egg hatching and 1st instar nymph emergence. On day 17, to enable counting under a microscope, cotton leaf petioles were detached and placed in glass vials containing water. Mortality ratios for eggs and nymphs were determined by calculating the abundance of unhatched eggs and dead nymphs relative to the total number of eggs and nymphs present.

[0447] To determine the impact of target dsRNAs and dsRNA-LDH (BioClay) on adult whiteflies, plant-based insectary trials were performed. Plant trials consisted of three to four cotton plants (with six-eight leaves per treatment group) and included water, LDH and CMV2b-dsRNA (non-specific) as control groups. Plants were sprayed with approximately 1 ml of 0.5 μg/μl of naked dsRNA and LDH-dsRNA (loading ratio 1:3) unless specified. Banjo (0.05%) penetrant was added to all treatment groups. First, cotton plants (4-6-week-old) were sprayed with controls, target dsRNA and/or dsRNA-LDH (BioClay)-Ammonium sulfate (10 mM) and allowed to dry for 24 hrs. Adult whiteflies (n=30) were collected in a glass vial using a vacuum pump and kept on ice for five minutes. to immobilize them. Whiteflies were then transferred into clip cages on expanded leaves of cotton plants. The plants were maintained in a climate controlled insectary (26±1° C., photoperiod of 16:8 (L:D) h, 50% relative humidity) for 8-11 days. Adult mortality was calculated by determining the abundance of dead adults relative to the total number of adults present.

### Statistical Analysis

[0448] The data are indicated as the mean+SE. Experimental data were analysed with Student's t-test or one-way analysis of variance in conjunction with Tukey's test to determine the significance of differences in mortality and gene knockdown using GraphPad prism 7.0 software. For all tests, P<0.05 was considered statistically significant.

### Results

### Identification of Novel Target Genes and Off-Target Analysis for RNAi-Mediated Control of Whitefly

[0449] For management of B. tabaci using RNAi approaches, novel target genes were identified by analysis of functional genomics data for insects and other closely related hemipteran species. In addition to the B. tabaci transcriptome expressions data, B. tabaci orthologues to other insect genes with promising RNAi phenotypes were searched with an expected value (e-value) threshold cut-off 1.0E-02 against the whitefly genome database (http://www.whiteflygenomics.org) and NCBI (https://blast.ncbi.nlm.nih.gov). Degradation of target transcripts in insects is dependent on the abundance and homology of dsRNA derived, Dicer-processed 20-22 nt siRNAs present in the cell's cytoplasm. As effective dsRNA and siRNA design strategies across insect orders are not well developed and likely variable given discrepancies in small RNA size and site cleavage preferences (https://www.mdpi.com/1999-4915/11/8/738, https://www.frontiersin.org/articles/10.3389/fphys.2018.01768/full), the present inventors focused on selecting dsRNA target sequences within target genes that minimised off-target homology. This ability to design dsRNA constructs that avoids unintended impacts on non-target organisms is a significant advantage for topically applied RNAi-based biopesticides relative to traditional chemical control measures. For an off-target cohort, humans (Homo sapiens) and key bioindicators honeybee (Apis mellifera, Apis florea, Apis dorsata, Apis cerana) and monarch butterfly (Danaus plexippus) were selected. As a proxy for sequence divergence, regions off approximately 400 bp within each whitefly transcript with the fewest contiguous 14 nt k-mers (sub-sequences) in common with the off-target cohort 14 nt k-mer set were identified, with in vitro dsRNA synthesis primer sites selected from within these regions. Using this approach, dsRNA constructs were designed for 96% of 15,662 transcripts.

[0450] As insects lack an RNA dependent RNA polymerase (RdRP)-based mechanism for amplification of the silencing signal (https://www.nature.com/articles/s41559-017-0403-4.pdf?proof=t), target transcripts that are too highly expressed may be difficult to sufficiently knock down due to the limited uptake inherit in a topical dsRNA application strategy. In contrast, target genes that are either not expressed or unevenly expressed during lifecycle stages overlapping with the dsRNA's window of protection are also unlikely to be efficacious targets. Accordingly, a transcript expression panel comprising multiple lifecycle stages including adult, nymph and egg was generated using publicly available RNA-seq datasets. This approach allowed for the selection of dsRNA constructs within a narrow band of expression (0.1-20 transcripts per million (TPM)) for subsequent use in high throughput screening assays.

[0451] In another approach, an off-target nucleotide homology threshold of 17 contiguous nucleotides was applied, and selected target genes were blasted against the transcriptomes of human, honeybees, monarch butterfly and other related species using the NCBI BLAST database and dsCheck (http://dscheck.rnai.jp/). Based on the BLAST outcomes, gene regions were identified as potential target sites and processed for PCR using T7 promoter attached gene-specific primers. The PCR products (145-467 bp) were then used to synthesize target dsRNAs for artificial diet (AD) and plant bioassays. Detailed information about selected ninety-four target genes and dsRNA sequences targeting these genes is given in Table 3.

### Screening of Potential Target Genes in Whitefly

[0452] Genes involved in embryonic development, egg hatching, feeding, moulting, growth, and development of the whitefly were identified from functional genomics and RNAi-based studies. The functional annotations of the sixty-three genes and the dsRNA sequences to target these whitefly genes are found in Table 3. Artificial diet (sucrose 30%) bioassay was used to screen candidate target genes. Sucrose 30% and GFP dsRNA (non-specific dsRNA control) were included as controls to ascertain the effect of whitefly specific dsRNA. The percentage adult whitefly mortality resulting in Sucrose treatment and from each of the target dsRNA and GFP dsRNA when applied at concentration of 200 ng/μL is shown in FIG. 1a and FIG. 2. Twenty-six out of sixty-three dsRNA tested caused 53-100% mortality of whitefly as compared to negative controls (sucrose and GFP dsRNA) six days post-feeding (FIG. 1a, 1b and FIG. 2). Of the twenty-six dsRNAs, fourteen caused ≥80% mortality (FIG. 1a) and twelve resulted in ≤80% mortality (FIG. 2) when compared mortality in the controls. As a comparison only 5-35% mortality was observed in whiteflies fed on sucrose 30% and GFP dsRNA. To further test whether the selected candidate dsRNA could efficiently silence the target gene expression and link it to the observed mortality, whiteflies exposed to diet containing dsRNA were collected and the transcript abundance of some of the selected targets was determined by RT-qPCR. Quantification of mRNA levels of seven of these genes (Aqp1, v-ATPase A, COPB1, ZFP, CHM4C, TreH and AChE1) using RT-qPCR showed 45-78% knockdown in whiteflies fed on dsRNA targeting each of these genes (FIG. 1c). These data demonstrate that oral diet-based dsRNA feeding causes significant knockdown of target genes and mortality in whitefly and these promising candidate genes could serve as target sites for RNAi-mediated control of this pest.

[0453] To determine whether the B. tabaci specific syntaxin dsRNA affects the performance of the stingless bee, Tetragonula hockingsi, cotton pad soaking bioassays were performed. In this study, the mortality of bees was unaffected after 6 days of feeding on syntaxin dsRNA (FIG. 1d), suggesting the target dsRNA has no significant effects on bees.

[0454] Among the seven genes whose silencing (FIG. 1c) resulted in significant mortality of whitefly in screening bioassay, AChE1 (100%), V-ATPase A (85%) and ZFP (83%) were chosen for assessing the efficacy of these when delivered as BioClay (dsRNA-LDH). In the first instance this was tested in artificial diet bioassays. The selected target dsRNAs and GFP dsRNA as a non-specific-control were used to prepare dsRNA-LDH complex and checked for complete loading on the agarose 1% gel (FIG. 1e). The naked dsRNA or dsRNA-LDH complex were mixed with sucrose and fed to adult whiteflies for 6 days. The naked dsRNA targeting AChE1, Aqp1 and v-ATPase A showed 76%, 96%, and 91% mortality, whereas BioClay of these targets resulted in 68%, 93%, and 91% mortality, respectively, compared to sucrose and GFP dsRNA-LDH which showed 28% and 18% mortality, respectively (FIG. 1f). This demonstrated that the dsRNA loaded on LDH was bioavailable and caused similar mortality as naked dsRNA in AD assays. The gene knockdown efficiency of selected dsRNAs was determined using RT-qPCR. Oral diet feeding of naked dsRNA and BioClay targeting AChE1, Aqp1 and v-ATPase A reduced the target mRNA level by 72% and 81%, 74% and 81%, 55% and 49%, respectively, compared to GFP-LDH (FIG. 1g). These results indicate that dsRNA loaded on LDH or BioClay can effectively deliver dsRNA through artificial diet resulting in silencing of target gene expression and mortality in whitefly.

TABLE 3
List of target genes tested in artificial diet screening and insectary plant bioassays

| | | | | | | SEQ | Mortality >25% | Mortality >50% | |
|---|---|---|---|---|---|---|---|---|---|
| Target | | Functional | | Target | Good | ID | to <50% in | to <80% in | Mortality >80% |
| gene | Gene ID | annotation | Bioassay | stage | target? | NO: | bioassays | bioassays | in bioassays |
| BtaRpl29 | Bta02466 | 60S ribosomal | AD, Plant | N/A | N/A | 392 | | | |
| | | protein L29 | | | | | | | |
| CMV 2b | LC066508.1 | Cucumber | Plant | N/A | N/A | 393 | | | |
| | | mosaic virus | | | | | | | |
| | | genomic RNA | | | | | | | |
| GFP | MT612434.1 | Cloning vector | AD | N/A | N/A | 394 | | | |
| | | pMSCV-syn- | | | | | | | |
| | | Gephyrin. | | | | | | | |
| | | FingR-GFP | | | | | | | |
| BtGAP | Bta07742 | Hunchback | AD | Adult | ✓ | 139 | | ✓ | |
| BtTreT | Bta13849 | Solute carrier | AD | Adult | ✓ | 140 | | ✓ | |
| | | family 2, | | | | | | | |
| | | facilitated | | | | | | | |
| | | glucose | | | | | | | |
| | | transporter | | | | | | | |
| | | member 8 | | | | | | | |
| BtCOPB1 | Bta11961 | Coatomer | AD | Adult | ✓ | 141 | | ✓ | |
| | | subunit beta | | | | | | | |
| BtAlGluc | Bta07452 | Alpha- | AD | Adult | ✓ | 142 | | ✓ | |
| | | glucosidase | | | | | | | |
| BtCHM4C | Bta01993 | Charged | AD | Adult | ✓ | 143 | | ✓ | |
| | | multivesicular | | | | | | | |
| | | body | | | | | | | |
| | | protein | | | | | | | |
| | | 4C, putative | | | | | | | |
| BtATP | Bta09165 | ATP synthase | AD | Adult | ✓ | 144 | | ✓ | |
| synthase | | subunit f, | | | | | | | |
| | | mitochondrial | | | | | | | |
| BtN2B | Bta20011 | Putative | AD | Adult | ✓ | 145 | | ✓ | |
| | | ATPase N2B | | | | | | | |
| BtRieske | Bta11991 | Cytochrome | AD | Adult | ✓ | 146 | | | ✓ |
| | | b-c1 complex | | | | | | | |
| | | subunit | | | | | | | |
| | | Rieske, | | | | | | | |
| | | mitochondrial | | | | | | | |
| BtAChE1 | Bta05381 | Acetylcholin- | AD, Plant | Egg, | ✓ | 160 | | | ✓ |
| | | esterase | | Nymph, | | | | | |
| | | 1 | | Adult | | | | | |
| BtTreH | Bta00329 | Trehalase | AD, Plant | Adult | ✓ | 161 | | | ✓ |
| BtAqp1 | Bta01973 | Aquaporin | AD, Plant | Egg, | ✓ | 162 | | | ✓ |
| | | 1 | | Nymph, | | | | | |
| | | | | Adult | | | | | |
| Btv- | Bta13958 | V-type proton | AD, Plant | Egg, | ✓ | 163 | | | ✓ |
| ATPase A | | ATPase | | Nymph, | | | | | |
| | | subunit a | | Adult | | | | | |
| BtZFP | Bta11919 | Zinc | AD, Plant | Egg, | ✓ | 164 | | | ✓ |
| | | finger | | Nymph, | | | | | |
| | | protein | | Adult | | | | | |
| BtGD | Bta02405 | Glucose | Plant | Egg, | ✓ | 165 | ✓ | | |
| | | dehydrogenase | | Nymph, | | | | | |
| | | | | Adult | | | | | |
| BtMYO | Bta07326 | Myosin | Plant | Egg, | ✓ | 166 | ✓ | | |
| | | regulatory | | Nymph, | | | | | |
| | | light chain 2 | | Adult | | | | | |
| BtTryp_SPc | Bta03794 | Trypsin-like | Plant | Egg, | ✓ | 171 | ✓ | | |
| | | serine protease | | Nymph | | | | | |
| BtDUOX | Bta10996 | Dual | Plant | Egg, | ✓ | 167 | ✓ | | |
| | | oxidase | | Nymph, | | | | | |
| | | | | Adult | | | | | |
| BtPNLIPRP2 | Bta09442 | Pancreatic | Plant | Egg, | ✓ | 172 | ✓ | | |
| | | lipase-related | | Nymph | | | | | |
| | | protein 2 | | | | | | | |
| BtSUC | Bta14312 | Sucrase | Plant | Egg, | ✓ | 168 | ✓ | | |
| | | | | Nymph, | | | | | |
| | | | | Adult | | | | | |
| BtGTF | Bta13266 | Glycosyl | Plant | Egg, | [symbol] | | | | |
| | | transferase | | Nymph, | | | | | |
| | | | | Adult | | | | | |
| BtrBAT | Bta07377 | Neutral | Plant | Adult | [symbol] | | | | |
| | | and basic | | | | | | | |
| | | amino acid | | | | | | | |
| | | transport | | | | | | | |
| | | protein | | | | | | | |
| | | rBAT | | | | | | | |
| BtVDAC | Bta08782 | Voltage- | AD | Adult | [symbol] | | | | |
| | | dependent | | | | | | | |
| | | anion-selective | | | | | | | |
| | | channel | | | | | | | |
| BtCYP450 | Bta07221 | Cytochrome P450 | AD | Adult | [symbol] | | | | |
| BtaATPase C | Bta15459 | V-type proton | AD | Adult | [symbol] | | | | |
| | | ATPase | | | | | | | |
| | | subunit C | | | | | | | |
| BtaATPase E2 | Bta00642 | V-type proton | AD | Adult | [symbol] | | | | |
| | | ATPase | | | | | | | |
| | | subunit E 2 | | | | | | | |
| BtaGABA4 | Bta00850 | Gamma- | AD | Adult | [symbol] | | | | |
| | | aminobutyric | | | | | | | |
| | | acid receptor | | | | | | | |
| | | subunit | | | | | | | |
| | | alpha-4 | | | | | | | |
| BtaGABA | Bta14895 | Gamma- | AD | Adult | [symbol] | | | | |
| 6 | | aminobutyric | | | | | | | |
| | | acid receptor | | | | | | | |
| | | subunit | | | | | | | |
| | | alpha-6 | | | | | | | |
| BtaClCP | Bta10706 | Chloride | AD | Adult | [symbol] | | | | |
| | | channel protein | | | | | | | |
| BtaGluR1 | Bta10706 | Glutamate | AD | Adult | [symbol] | | | | |
| | | receptor-1 | | | | | | | |
| BtaCHM2b | Bta09410 | Charged | AD | Adult | [symbol] | | | | |
| | | multivesicular | | | | | | | |
| | | body protein | | | | | | | |
| | | 2b-B | | | | | | | |
| BtaCMB7 | Bta09904 | Charged | AD | Adult | ✓ | 147 | | ✓ | |
| | | multivesicular | | | | | | | |
| | | body protein 7 | | | | | | | |
| BtaSNF8 | Bta07537 | Vacuolar- | AD | Adult | [symbol] | | | | |
| | | sorting | | | | | | | |
| | | protein SNF8 | | | | | | | |
| BtaCHM6A | Bta00404 | Charged | AD | Adult | [symbol] | | | | |
| | | multivesicular | | | | | | | |
| | | body protein | | | | | | | |
| | | 6-A | | | | | | | |
| BtaCHM3 | Bta02800 | Charged | AD | Adult | [symbol] | | | | |
| | | multivesicular | | | | | | | |
| | | body protein 3 | | | | | | | |
| BtaCOPG | Bta07395 | Coatomer | AD | Adult | [symbol] | | | | |
| | | subunit gamma | | | | | | | |
| BtaIAP | Bta08342 | Baculoviral | AD | Adult | [symbol] | | | | |
| | | IAP repeat- | | | | | | | |
| | | containing | | | | | | | |
| | | protein 7 | | | | | | | |
| BtaBur | Bta08016 | Bursicon, | AD | Adult | [symbol] | | | | |
| | | putative | | | | | | | |
| BtaSALP | Bta13152 | Salivary | AD | Adult | [symbol] | | | | |
| | | protein 1310 | | | | | | | |
| BtaTPS | Bta15703 | Trehalose | AD | Adult | [symbol] | | | | |
| | | 6-phosphate | | | | | | | |
| | | synthase | | | | | | | |
| BtaFHBP | Bta02441 | Forkhead box | AD | Adult | [symbol] | | | | |
| | | protein B1 | | | | | | | |
| BtaChorion | Bta13877 | Chorion- | AD | Adult | ✓ | 148 | | ✓ | |
| | | specific | | | | | | | |
| | | transcription | | | | | | | |
| | | factor GCMa | | | | | | | |
| BtaAmy | Bta10119 | Amyloid beta A4 | AD, Plant | Adult | [symbol] | | | | |
| | | protein-binding | | | | | | | |
| | | family A | | | | | | | |
| | | member 1 | | | | | | | |
| BtaCytoc | Bta11782 | Cytochrome | AD | Adult | [symbol] | | | | |
| | | c-type | | | | | | | |
| | | heme lyase | | | | | | | |
| BtaSurfeit | Bta01046 | Surfeit locus | AD, Plant | Adult | ✓ | 149 | | | ✓ |
| | | protein 4 | | | | | | | |
| BtaNAT15 | Bta09847 | N-alpha-acetyl- | AD, Plant | Adult | [symbol] | | | | |
| | | transferase 15 | | | | | | | |
| BtaEH | Bta11007 | EH domain- | AD | Adult | ✓ | 150 | | ✓ | |
| | | containing | | | | | | | |
| | | protein 1 | | | | | | | |
| BtaZFP76 | Bta10540 | Zinc finger | AD | Adult | [symbol] | | | | |
| | | protein 76 | | | | | | | |
| BtaCleavage | Bta06507 | Cleavage | AD | Adult | ✓ | 151 | | | ✓ |
| | | stimulation | | | | | | | |
| | | factor | | | | | | | |
| | | subunit 3 | | | | | | | |
| BtaSyntax | Bta06944 | Syntaxin | AD, Plant | Adult | ✓ | 152 | | | ✓ |
| | | binding | | | | | | | |
| | | protein-1,2,3 | | | | | | | |
| BtaDyn | Bta02194 | Dynactin | AD, Plant | Egg, | ✓ | 169 | | | ✓ |
| | | subunit | | Nymph, | | | | | |
| | | | | Adult | | | | | |
| BtaProteosome | Bta07401 | 26S proteasome2 | AD | Adult | [symbol] | | | | |
| | | non-ATPase | | | | | | | |
| | | regulatory | | | | | | | |
| | | subunit 5 | | | | | | | |
| BtaCd6 | Bta11395 | Cdc6 | AD, Plant | Adult | ✓ | 153 | | | ✓ |
| BtaU5 | Bta03452 | U5 small nuclear | AD, Plant | Adult | [symbol] | | | | |
| | | ribonucleo | | | | | | | |
| | | protein | | | | | | | |
| | | 200 kDa helicase | | | | | | | |
| BtaMediator | Bta08552 | Mediator of RNA | AD, Plant | Adult | ✓ | 154 | | | ✓ |
| | | polymerase II | | | | | | | |
| | | transcription | | | | | | | |
| | | subunit 17 | | | | | | | |
| BtaExp2 | Bta06241 | Exportin-2 | AD | Adult | [symbol] | | | | |
| BtacAMP | Bta02506 | cAMP-dependent | AD | Adult | [symbol] | | | | |
| | | protein kinase | | | | | | | |
| | | type I | | | | | | | |
| | | regulatory | | | | | | | |
| | | subunit | | | | | | | |
| BtaATP | Bta10956 | ATP- | AD, Plant | Adult | ✓ | 155 | | | ✓ |
| binding | | binding | | | | | | | |
| | | cassette | | | | | | | |
| BtaTre | Bta03198 | Trehalase | AD | Adult | [symbol] | | | | |
| BtaZFP26 | Bta08770 | Zinc | AD | Adult | [symbol] | | | | |
| | | finger | | | | | | | |
| | | protein 26 | | | | | | | |
| BtaKelch8 | Bta09087 | Kelch-like | AD | Adult | [symbol] | | | | |
| | | protein 8 | | | | | | | |
| BtaTre | Bta03197 | Trehalase | AD | Adult | [symbol] | | | | |
| BtaRRP42 | Bta03733 | Exosome | AD, Plant | Adult | ✓ | 156 | | ✓ | |
| | | complex | | | | | | | |
| | | component RRP42 | | | | | | | |
| BtaKelch | Bta01226 | Kelch | AD | Adult | [symbol] | | | | |
| | | domain- | | | | | | | |
| | | containing | | | | | | | |
| | | protein 4 | | | | | | | |
| BtaStill | Bta00380 | Protein | AD, Plant | Adult | [symbol] | | | | |
| | | still life, | | | | | | | |
| | | isoform | | | | | | | |
| | | SIF type 1 | | | | | | | |
| BtaKappaB | Bta08258 | Nuclear factor | AD, Plant | Adult | ✓ | 157 | | | ✓ |
| | | kappa-B-binding- | | | | | | | |
| | | like protein | | | | | | | |
| BtaNFkappa | Bta02091 | NF-kappa- | AD | Adult | [symbol] | | | | |
| | | B-activating | | | | | | | |
| | | protein | | | | | | | |
| BtaATPaseAAA | Bta14342 | ATPase | AD, Plant | Adult | ✓ | 158 | | ✓ | |
| | | family | | | | | | | |
| | | AAA domain- | | | | | | | |
| | | containing | | | | | | | |
| | | protein 1-B | | | | | | | |
| BtaExp4 | Bta04332 | Exportin-4 | AD | Adult | [symbol] | | | | |
| BtaSyntaxin | Bta14843 | Syntaxin- | AD, Plant | Adult | [symbol] | | | | |
| | | binding | | | | | | | |
| | | protein 5 | | | | | | | |
| BtaNAT | Bta09847 | N-alpha- | AD | Adult | [symbol] | | | | |
| | | acetyl- | | | | | | | |
| | | transferase | | | | | | | |
| | | 15, NatA | | | | | | | |
| | | auxiliary | | | | | | | |
| | | subunit | | | | | | | |
| BtaSec31A | Bta06183 | Protein | AD | Adult | [symbol] | | | | |
| | | transport | | | | | | | |
| | | protein Sec31A | | | | | | | |
| BtaCysGly | Bta08216 | Cysteine and | Plant | Egg, | [symbol] | | | | |
| | | glycine-rich | | Nymph | | | | | |
| | | protein | | | | | | | |
| BtaTPS3 | Bta03375 | Transmembrane | Plant | Egg, | [symbol] | | | | |
| | | protease | | Nymph | | | | | |
| | | serine 3 | | | | | | | |
| BtaGD | Bta08909 | Glucose | Plant | Egg, | [symbol] | | | | |
| | | dehydrogenase | | Nymph | | | | | |
| BtaG6PD | Bta08749 | Glucose- | Plant | Adult | [symbol] | | | | |
| | | 6-phosphate 1- | | | | | | | |
| | | dehydrogenase | | | | | | | |
| BtaFABP | Bta15018 | Fatty acid | Plant | Egg, | [symbol] | | | | |
| | | binding | | Nymph | | | | | |
| | | protein | | | | | | | |
| BtaJHIP | Bta01142 | Juvenile | Plant | Egg, | [symbol] | | | | |
| | | hormone- | | Nymph | | | | | |
| | | inducible | | | | | | | |
| | | protein | | | | | | | |
| BtaVit | Bta14071 | Vitellogenin | Plant | Egg, | [symbol] | | | | |
| | | | | Nymph | | | | | |
| BtaDC | Bta07227 | Dopa- | Plant | Egg, | [symbol] | | | | |
| | | decarboxylase | | Nymph | | | | | |
| BtaRas | Bta12704 | Ras- | Plant | Egg, | [symbol] | | | | |
| | | related | | Nymph | | | | | |
| | | GTP | | | | | | | |
| | | binding | | | | | | | |
| | | protein | | | | | | | |
| BtaJHEH1 | Bta00739 | Juvenile | Plant | Egg, | [symbol] | | | | |
| | | hormone | | Nymph | | | | | |
| | | epoxide | | | | | | | |
| | | hydrolase 1 | | | | | | | |
| BtaJHEBP | Bta07266 | Juvenile | Plant | Egg, | [symbol] | | | | |
| | | hormone | | Nymph | | | | | |
| | | esterase | | | | | | | |
| | | binding | | | | | | | |
| | | protein | | | | | | | |
| BtaAllato | Bta02917 | Allatostatin | Plant | Egg, | [symbol] | | | | |
| | | double | | Nymph | | | | | |
| | | C, isoform C | | | | | | | |
| BtaMtor | Bta15399 | Serine/threonine- | Plant | Egg, | [symbol] | | | | |
| | | protein kinase | | Nymph | | | | | |
| | | Mtor | | | | | | | |
| BtaS6K | Bta04220 | S6 kinase- | Plant | Egg, | [symbol] | | | | |
| | | like protein | | Nymph | | | | | |
| BtaAqp12 | Bta14320 | Aquaporin-12 | Plant | Adult | [symbol] | | | | |
| BtaT6PS | Bta08458 | Trehalose | Plant | Adult | [symbol] | | | | |
| | | 6- | | | | | | | |
| | | phosphate | | | | | | | |
| | | synthase | | | | | | | |
| BtarBAT | Bta07377 | Neutral | Plant | Adult | ✓ | 159 | ✓ | | |
| | | and basic | | | | | | | |
| | | amino acid | | | | | | | |
| | | rBAT | | | | | | | |
| BtaAGluc1 | Bta05397 | Alpha | Plant | Adult | [symbol] | | | | |
| | | glucosidase | | | | | | | |
| BtaAGluc2 | Bta03991 | Alpha | Plant | Adult | [symbol] | | | | |
| | | glucosidase | | | | | | | |
| BtaAGluc3 | Bta03992 | Alpha | Plant | Adult | [symbol] | | | | |
| | | Glucosidase | | | | | | | |
| BtaAGluc4 | Bta08428 | Alpha | Plant | Adult | [symbol] | | | | |
| | | glucosidase | | | | | | | |
| BtaAGluc5 | Bta04421 | Alpha | Plant | Adult | [symbol] | | | | |
| | | Glucosidase | | | | | | | |
| BtaGTF | Bta07245 | Glycosyl | Plant | Adult | ✓ | 173 | ✓ | | |
| | | transferase | | | | | | | |
| BtaNucI | Bta11788 | Deoxyribo | Plant | Egg, | [symbol] | | | | |
| | | nuclease II | | Nymph, | | | | | |
| | | | | Adult | | | | | |
| BtaNucII | Bta06243 | Deoxyribo- | Plant | Egg, | ✓ | 170 | ✓ | | |
| | | nuclease I | | Nymph, | | | | | |
| | | | | Adult | | | | | |
| Construct- | Bta13958 | (v-ATPase-ZFP) | | Egg, | ✓ | 395 | | | ✓ |
| I | Bta11919 | Stacked | | Nymph, | | | | | |
| | | construct | | Adult | | | | | |
| Construct- | Bta05381 | (AChE1-Btv- | AD | Adult | [symbol] | | | | |
| II | Bta13958 | ATPase A) | | | | | | | |
| | | Stacked | | | | | | | |
| | | construct | | | | | | | |
| Construct- | Bta13958 | V-ATPase A- | AD | Adult | [symbol] | | | | |
| III | Bta05381 | AChE1-ZFP | | | | | | | |
| | Bta11919 | | | | | | | | |

Combination and Stacking of dsRNAs to Improve RNAi Effects

[0455] To investigate whether the RNAi-mediated mortality can be enhanced by targeting more than one gene in adult whitefly, combination of two effective dsRNA targets were tested in artificial diet bioassays. Two approaches were used to assess combinatorial RNAi effects including (i) mixing the two target dsRNAs or (ii) stacking two dsRNAs into single expression construct. For the approach of expressing the dsRNAs as single targets and mixing thereafter, three dsRNAs targeting v-ATPase A, ZFP, and AchE1 were selected based on their gene silencing and mortality in artificial diet bioassays. The selected single dsRNA (100 ng/μl) or mixture of two dsRNAs (100 ng/μl of each dsRNA) were fed to whitefly adults. All three combinations of dsRNAs AChE1 and v-ATPase A (FIG. 3a), AChE1 and ZFP (FIG. 3b), v-ATPase A and ZFP (FIG. 3c) showed 92%, 74% and 94% mortality, respectively as compared to single dsRNA in resulted showing 46% and 63%, 46% and 55%, and 55% and 46% mortality, respectively. Comparatively, sucrose and GFF dsRNA resulted in only 7-31% mortality. This significantly higher whitefly mortality in mixed dsRNAs groups compared to feeding the whiteflies with the individual dsRNAs demonstrates that the combinations of dsRNAs is more effective (FIGS. 3a, 3b, and 3c). This increase in RNAi-mediated mortality suggests that it is feasible to target two genes simultaneously in the whitefly by combination of dsRNAs. The next question that was addressed whether increased RNA-mediated mortality was also reflected in decrease in gene expression of both the target genes. Whiteflies were fed on single or mixture of dsRNAs for 4 days and surviving insects were collected for gene expression analysis by RT-qPCR. The mixed dsRNAs AChE1 and v-ATPase A (FIGS. 3d and 3e), AChE1 and ZFP (FIGS. 3f and 3g), v-ATPase A and ZFP (FIGS. 3h and 3i) reduced mRNA expression of both target genes 78% and 62%, 52% and 59%, and 63% and 72%, respectively, compared to whiteflies fed on non-specific GFP dsRNA. The single dsRNA targeting AChE1 and v-ATPase A (FIGS. 3d and 3e), AChE1 and ZFP (FIGS. 3f and 3g), v-ATPase A and ZFP (FIGS. 3h and 3i) caused 61% and 63%, 52% and 68%, and 74% and 61% reduction in target mRNA levels in whitefly. These results clearly demonstrate that mixing of dsRNAs can significantly improve RNAi-mediated control of B. tabaci via diet feeding.

[0456] Studies were also conducted to investigate whether stacking of dsRNAs targeting v-ATPase A, AchE1 and ZFP into a single expression vector will give the same result to what was observed by mixing the dsRNAs post expression as single targets. Two stacked dsRNAs namely construct-I (v-ATPase A and ZFP) and Construct-II (v-ATPase A and AchE1) expressed as single construct and mixture of the same dsRNAs were fed to adult whiteflies via artificial diet and mortality were recorded up to six days. Whiteflies fed on stacked construct-I and stacked construct-II dsRNA showed 93% and 72% mortality, respectively, whereas insects exposed to mixture of the same dsRNAs resulted in 56% and 62% mortality (FIGS. 3j and 3k), respectively. In comparison, sucrose and GFP dsRNA showed only 4-8% mortality. Interestingly, out of the two selected stacked dsRNAs, construct-I only showed significantly higher whitefly mortality than corresponding mixture of dsRNAs. Although these results indicated that the stacking of dsRNAs can improve whitefly mortality, the effect of dsRNAs in this stacked dsRNA treatment could be variable than mixture of same dsRNAs due to differences in siRNA pool generation by dicer. To test whether the stacked construct-I resulted in mortality due to the silencing of both target genes, whiteflies were fed on mixed or stacked dsRNAs (construct-I) targeting v-ATPase A and ZFP for 4 days. Surviving whiteflies were collected and RT-qPCR was performed. Whiteflies fed on stacked dsRNAs showed 57% and 45% reduction in v-ATPase A and ZFP mRNA levels, respectively, whereas mixed dsRNA resulted in only 23% and 24% decrease in target mRNA expression, respectively as compared to GFP dsRNA (FIGS. 3l and 3m). These results suggest that stacking of dsRNAs can significantly increase RNAi-mediated mortality by suppressing both target genes simultaneously.

### Foliar Spray of BioClay for Whitefly Control

[0457] The life cycle of whitefly is composed of six-stages, which limits the potential for a single pesticide application to eradicate the various developmental stages, including egg, nymph and adult. To address this issue, the present inventors investigated for the first time whether foliar spray of naked dsRNA and dsRNA-LDH (BioClay) could be used to provide RNAi-mediated control against developmental stages of whitefly.

[0458] The efficacy of dsRNA-LDH, or BioClay, as an effective RNAi-based biopesticide for control of whitefly eggs and nymphs on cotton was assessed in plant-based insectary trials. The conventional untreated non-Bt cotton variety Sicot 620 at the 2-3 leaf stage were used for insectary trials. The most promising five target genes identified from artificial diet screening bioassays and twenty-two new candidate genes were selected based on their expression levels in different life-stages and critical functions in egg hatching and nymph survival (Table 3 and 4). These selected genes were tested against eggs and nymphs via plants-based insectary trials. The loading ratio of 1:3 dsRNA-LDH was used in all insectary trials instead of completely loaded BioClay ratio 1:4 (FIG. 4) to provide a small amount of free dsRNA which could be immediately available for eggs or nymphs triggering RNAi response from the moment of foliar spray application.

[0459] For plant-based egg and nymph trials, the adult whiteflies were released into clip cages on Cotton (Sicot 620) plants at two-three leaf stage and allowed oviposition for up to 18-24 hrs. Leaves with eggs present were sprayed on both sides with naked dsRNA and/or BioClay on day 1 and 10. The percentage mortality of eggs and nymphs were determined 17 days post first spray treatment. The sequence specificity of target dsRNA in inducing RNAi-mediated mortality of whitefly was confirmed using the CMV2b-dsRNA as a non-specific dsRNA control. The plants-based insectary trials were conducted by spraying the plants with water, LDH only, CMV2b-dsRNA, target dsRNA and target dsRNA-LDH (BioClay). Water, LDH and CMV2b-dsRNA treated plants showed an average of 5-29% eggs and nymph mortality on day 17 (FIG. 5a). In comparison, naked dsRNA targeting Glucose dehydrogenase (GD), Myosin (MYO), GD+Construct-I, MYO+Construct-I, Trypsin-like serine protease (Tryp_SPc), Dual oxidase (DUOX), Pancreatic lipase (PNLIPRP2), Sucrase (SUC), Glycosyl transferase (GTF) and rBAT showed only 17-44% eggs and nymph mortality, whereas target dsRNA-LDH resulted in 34-62% mortality compared to the water, LDH and CMV2b dsRNA treatments (FIG. 5a). Importantly, cotton plants sprayed with only dsRNA-LDH (BioClay) targeting MYO, GD+Construct-I, MYO+Construct-I, Tryp_SPc, DUOX, PNLIPRP2, SUC, GTF and rBAT resulted in significantly higher egg and nymph mortality compared to water and naked dsRNA treated plants (FIGS. 5a and 5d). However, plants sprayed with these naked dsRNA did not result in significant egg and nymph mortality than water treated plants (FIG. 5a). These results clearly demonstrate that foliar application of BioClay effectively controls whitefly eggs and nymphs than naked dsRNA.

[0460] A previous study reported that gut nucleases are major limitations to an efficient RNAi response in hemipteran insects, as they may cause degradation of orally ingested dsRNA1. To examine whether mixing of target dsRNA with whitefly nuclease-specific dsRNA (dsRNase2) can increase egg and nymph mortality, SUC (500 ng/μl) or DUOX dsRNA (500 ng/μl) mixed with dsRNase2 dsRNA (300 ng/μl) and LDH was added to form BioClay (1:3) and sprayed on cotton plants. Water, LDH and CMV2b-dsRNA controls sprayed cotton plants showed 13-21% egg and nymph mortality on day 17. dsRNase2, SUC and DUOX dsRNA only sprayed plants showed only 9%, 5%, and 19% mortality, respectively (FIGS. 5b and 5c). Importantly, plants sprayed with sucrase-dsRNase2-LDH and DUOX-dsRNase2-LDH resulted in 66% and 59% mortality, whereas sucrase-LDH showed only 34% and 19% mortality, respectively. These data demonstrate that mixing of target dsRNA with nuclease specific dsRNA can significantly improve the efficacy of RNAi in whitefly.

[0461] To further determine the effect of foliar spray of naked dsRNA and BioClay on survival of adult whiteflies was tested by plant-based insectary trials. Nineteen dsRNAs resulting in >50% mortality in artificial diet bioassays and newly identified seventeen dsRNAs targeting adult whiteflies were tested in plant-based insectary trials (Table 3 and 4). For insectary trials, Banjo penetrant (0.05%) was added to improve the uptake of dsRNA in plants. The cotton plants were sprayed with water, LDH, CMV2b-dsRNA, naked target dsRNA and LDH-target dsRNA (BioClay) on day 0. Approximately, 200 adult whiteflies per treatment group were released into 3-4 separate clip cages 24 hrs post-spray. Whiteflies fed on water, LDH, and CMV2b-dsRNA sprayed plants showed 8-42% mortality. Among the tested target dsRNAs, SUC (FIG. 5e), SUC+DUOX (FIG. 5f), and Syntaxin (FIG. 5g) caused 64%, 46%, and 56% mortality in naked dsRNAs and 80%, 85%, and 67% mortality in LDH-dsRNA (BioClay) treatments, respectively, after eight days. Unexpectedly, adult whiteflies fed on SUC dsRNA and SUC dsRNA-LDH showed reduction in honeydew secretion post 8 days (FIG. 6). These observations suggest a novel application of RNAi not only for controlling whiteflies but also for reducing secondary damage by the pest on cotton plants. RT-qPCR analysis demonstrated 30-89% knockdown in the expression of these target genes in adult whiteflies fed on dsRNA targeting each of these genes. These outcomes indicate that foliar application of dsRNA loaded on LDH or BioClay causes significant silencing of target genes and mortality in adult whiteflies through plants-based insectary trials.

Uptake and Internalization of dsRNA in Plants

[0462] For foliar application of dsRNA to provide RNAi-mediated control against hemipteran insects, the dsRNAs must travel through the leaf barriers such as waxy cuticle before reaching to the vascular bundle. One of the most crucial strategies to bypass the potential barriers to dsRNA uptake in plants via foliar application could be the incorporation of penetrant. Penetrants are adjuvants that can improve the absorption of active ingredients into plant tissues (Dubovik V, Dalinova A, Berestetskiy A. Effect of Adjuvants on Herbicidal Activity and Selectivity of Three Phytotoxins Produced by the Fungus, Stagonospora cirsii. Plants (Basel) 9(2020)). Penetrants such as Banjo (active ingredient—725 g/L Methyl ester (canola oil)) and Supercharge elite (active ingredient—471 g/L paraffin oil) increases the uptake of herbicide into the leaves by dissolving waxy cuticles, whereas Pulse penetrant improves the uptake through stomatal flooding.

[0463] The uptake of Cy3-dsRNA into plant tissues was investigated by labelling the dsRNA with Cy3 fluorophores. Droplets of Cy3 only, fluorophore labelled CMV2b-dsRNA without penetrant or with either Banjo, Supercharge Elite or Pulse penetrants were topically applied to cotton leaves and visualized under confocal microscope 24 hours post-application for uptake of Cy3 into the leaf (FIG. 7a). Confocal imaging followed with Z-stack analysis of the adaxial (upper) surface of CMV2b-dsRNA-Cy3 treated leaves showed uptake of Cy3 in the spongy mesophyll, whereas no fluorescence was observed in leaves treated with Cy3-alone after rinsing (FIGS. 7a and 8. Importantly, all leaves treated with either of the penetrant showed abundant uptake and deeper penetration of Cy3 into the spongy mesophyll and plants vascular bundle (FIGS. 7, 8 and 9). Furthermore, translaminar movement of Cy3 fluorescence was observed in all leaves treated with CMV2b-dsRNA-Cy3-Penetrant, whereas leaves treated with CMV2b-dsRNA-Cy3 showed no movement of Cy3 into the leaf when visualized from the abaxial (lower) surface (FIG. 9). These results demonstrate that the addition of either of the penetrant to dsRNA can improve the uptake of dsRNA into the plants vascular bundle and translaminar movement of topically applied dsRNA into the plants.

[0464] For dsRNA-LDH (BioClay) to provide RNAi-mediated control against whiteflies, the target dsRNA must not only be released on to the leaf surface, but also be taken up into the leaf. Naked CMV2b-dsRNA and completely bounded CMV2b-dsRNA-LDH (loading ratio 1:4) was used to assess the uptake of dsRNA into the leaf. Droplets of Cy3-Banjo penetrant, CMV2b-dsRNA-Cy3-Banjo, and CMV2b-dsRNA-Cy3-LDH-Banjo was topically applied to cotton leaves. After 72 hours of incubation, leaves were rinsed before visualisation under a confocal microscope. CMV2b-dsRNA-Cy3-Banjo and CMV2b-dsRNA-Cy3-LDH-Banjo treated leaves showed fluorescence in the spongy mesophyll and vascular bundle, whereas no fluorescence was observed in Cy3-Banjo treated leaves after rinsing (FIG. 10). Furthermore, Z-stack analysis was used to verify that the Cy3 fluorescence observed in the spongy mesophyll and vascular bundle was internalized (FIG. 11). These results suggest that both naked dsRNA and dsRNA released from the bound dsRNA-LDH complex were taken up by cotton plants.

TABLE 4
Number of target genes screened against developmental
stages of whitefly in artificial diet and plant assays

| Target whitefly life-stage | Number of genes | Screening assay |
|---|---|---|
| Adult | 63 | Artificial diet |
| Adult, Egg and Nymph | 5 | Artificial diet and Plant |
| Egg and Nymph | 22 | Plant |
| Adult | 17 | Plant |

Uptake of dsRNA in Whitefly

[0465] For efficient gene silencing, the whitefly must first take up exogenous dsRNA from the surrounding environment (artificial diet, detached leaf, or plant). The consumed dsRNA must then traverse the gut lumen into the insect gut cells. To assess whether dsRNA can be taken up by whiteflies through an artificial diet, sucrose only and sucrose-GFP-dsRNA-Cy3 were fed to adult insects. After 24 hours feeding, whole larvae were visualized under a confocal microscope for uptake of Cy3 into the insect. Clear Cy3-fluorescence was observed in the abdomen of the insects, whereas no fluorescence was visualized in the control sucrose fed larvae (FIG. 12). Combined with the fact that RNAi-mediated gene silencing is not limited to the site of dsRNA delivery, the spread of Cy3-fluorescence throughout the abdomen may suggest that systemic RNAi exist in whitefly. Furthermore, the uptake of GFP dsRNA in the whitefly was validated by RT-PCR followed by gel electrophoresis. Whiteflies fed on GFP-dsRNA-Cy3 showed uptake of GFP dsRNA, whereas no amplification was observed in the insects fed on only sucrose (FIG. 13). These observations clearly demonstrate that whitefly uptake dsRNA through artificial diet bioassays and these bioassays can be used for screening of potential target genes.

[0466] To assess the ability of whitefly to take up and internalize dsRNA via leaf feeding, detached cotton leaf petioles were dipped in a nuclease-free water (control) or CMV2b-dsRNA-Cy3 solution for 24 hours and adult whiteflies allowed to feed for a further 48 hours. Whole larvae examined under a confocal microscope showed Cy3-fluorescence signals in the gut when fed on CMV2b-dsRNA-Cy3 treated leaf tissue, whereas no fluorescence signal was observed in the whiteflies fed on water treated leaf tissue (FIG. 14). Additionally, the uptake of CMV2b-dsRNA in the whitefly was assessed by northern blot analysis. CMV2b-dsRNA was detectable in the whiteflies fed on CMV2b-dsRNA-Cy3 treated leaves, whereas no CMV2b-dsRNA was detected in whiteflies fed on water treated leaves (FIG. 15). These results clearly suggest that whiteflies can take up dsRNA through detached petiole dip assay and this method could be potentially useful in pest control platforms against hemipteran insects.

[0467] To further investigate the uptake of dsRNA into whiteflies through foliar application, droplets of nuclease free water (control), CMV2b-dsRNA-Cy3, and CMV-2b-dsRNA-Cy3-Banjo penetrant were applied onto the adaxial or abaxial surface of cotton leaves of fully intact plants. After 24 hours of incubation, adult whiteflies were released into clip-cages and allowed to feed on the abaxial side of the leaf for further 48 h before being visualized by confocal microscopy. Whiteflies fed on the leaf treated abaxially with CMV2b-dsRNA-Cy3 and CMV-2b-dsRNA-Cy3-Banjo penetrant showed a clear fluorescence signal in the gut of the insects, whereas no fluorescence signals were observed in whiteflies fed on water treated leaves (FIG. 16a). Interestingly, whiteflies fed on the leaf treated adaxially with dsRNA and dsRNA-penetrant showed a fluorescence signal in the gut, suggesting the insect can take up dsRNA from the phloem and not from the surface (FIGS. 16b and 17). These data clearly demonstrate that whitefly, a phloem feeder, can take up foliar applied dsRNA and that this delivery method could serve as a potential strategy for RNAi-mediated control of whiteflies.

[0468] Importantly this constitutes the first report of topically applied dsRNA uptake by whitefly feeding on intact plants. The current published literature is limited to artificial diet assays.

### DISCUSSION

[0469] The present inventors have identified ninety-four target genes in whitefly B. tabaci and extended their studies by three means: First, they used the diet feeding screening bioassays to identify potential RNAi target genes in the whitefly B. tabaci. dsRNAs targeting these novel RNAi target genes efficiently caused mortality in the whitefly and showed better performance than previously used genes. Secondly, the present inventors have tested whether RNAi efficiency could be increased by targeting two genes simultaneously in a single feeding bioassay. Both (i) mixing dsRNAs and (ii) stacking dsRNAs showed improved RNAi-mediated mortality in whitefly due to suppression of both the target genes. Third, the present inventors investigated the efficacy of LDH bounded dsRNA though diet feeding bioassays in whitefly. In this study, feeding of LDH bounded dsRNA showed significant gene knockdown and mortality in the whitefly B. tabaci. These results clearly demonstrate LDH nanosheets can effectively deliver dsRNA in the insect.

[0470] The present inventors have shown for the first time the foliar application of dsRNA using the LDH nanocarrier that can effectively control developmental stages of whiteflies, offering an alternative to conventional plant breeding and transgenic approaches. The use of RNAi-based foliar spray is shown to be effective against plant viruses (Mitter N, Worrall E A, Robinson K E, Li P, Jain R G, Taochy C, et al. Clay nanosheets for topical delivery of RNAi for sustained protection against plant viruses. Nature Plants 3:16207 (2017); Tenllado F, Diaz-Ruiz J R. Double-stranded RNA-mediated interference with plant virus infection. J Virol 75:12288-12297 (2001)), with little research against sap-sucking pests due to the limited transport of dsRNA into phloem cells considered a potential hurdle (Dalakouras A, Jarausch W, Buchholz G, Bassler A, Braun M, Manthey T, et al. Delivery of Hairpin RNAs and Small RNAs Into Woody and Herbaceous Plants by Trunk Injection and Petiole Absorption. Front Plant Sci 9:1253 (2018)). Previous studies have shown the successful application of nanoparticles to enhance stability and uptake of the target dsRNA in vivo (Zhang X, Zhang J, Zhu K Y. Chitosan/double-stranded RNA nanoparticle-mediated RNA interference to silence chitin synthase genes through larval feeding in the African malaria mosquito (Anopheles gambiae). Insect Mol Biol 19:683-693 (2010)). Here, the present inventors have shown that foliar application of BioClay can deliver the target dsRNA into vascular bundles and subsequently be taken up by whiteflies resulting in increased mortality of insects. Further, mixing of LDH bounded dsRNAs targeting sucrase and dsRNase showed increased mortality of whitefly eggs and nymphs via foliar spray. These findings demonstrate that in sap-sucking insects such as B. tabaci efficacy and success of RNAi against specific target genes can be improved by combination with dsRNA targeting the dsRNase genes.

[0471] Previous studies have shown the incorporation of transfection agents or the co-formulants, high pressure spraying, abrasion, and abaxial stomatal flooding can improve cuticle penetration and cellular uptake of siRNA (Dalakouras A, Wassenegger M, McMillan J N, Cardoza V, Maegele I, Dadami E, et al. Induction of Silencing in Plants by High-Pressure Spraying of In vitro-Synthesized Small RNAs. Front Plant Sci 7:1327 (2016); Huang, S., Iandolino, A., and Peel, G. (2018). Methods and Compositions for Introducing Nucleic Acids into Plants. U.S. Patent No. 20180163219A1). The present inventors have shown that addition of penetrant to the dsRNA can efficiently improve the uptake of dsRNA into the plant vascular bundles when topically applied onto the leaves (FIG. 7). The confocal microscopy followed with Z-stack image analysis showed that penetrant can assist the dsRNA to enter and transport to vascular bundles faster compared to the dsRNA without penetrant (Fig. S8). However, differentiating the dsRNA from the Cy3 fluorophore is challenging due to the overlapping wavelengths of Cy3 dye and chlorophyll that does not clearly confirm dsRNA uptake in plants. To address this issue, fluorescence lifetime imaging microscopy (FLIM) confocal platform was used that distinguish the autofluorescence from the leaf from the Cy3 fluorescence signal. The confocal microscopy coupled with Nanopore sequencing indicates that foliar applied dsRNA can be taken up by whitely. These observations suggest the possibility of transport of dsRNA through the phloem. Further, 3D surface rendering of the reflective and fluorescence mode was used to confirm the Cy3 fluorescence is inside the whitefly body and not on the outside surface (FIG. 17).

[0472] To summarize, the present inventors have clearly showed that the foliar application of BioClay can effectively control developmental stages of whiteflies. The study demonstrated the potential for BioClay platform using mixing of dsRNAs for improving RNAi effects.

1-45. (canceled)

46. A silencing element comprising at least one double-stranded RNA region, at least one strand of which comprises a polynucleotide that is complementary to:
(a) a nucleotide sequence comprising the sequence of any one of SEQ ID NOS: 139-173; and complements thereof;
(b) a nucleotide sequence comprising at least 70% sequence identity to the sequence of any one of nucleotides SEQ ID NOS: 139-173; and complements thereof; or
(c) a nucleotide sequence comprising at least 19 consecutive nucleotides of the sequence of any one of SEQ ID NOS: 139-173; and complements thereof;
wherein the silencing element has insecticidal activity against an insect plant pest.

47. The silencing element of claim 46, wherein the least one strand of which comprises a polynucleotide that is complementary to a nucleotide sequence comprising the sequence of any one of SEQ ID NOS: 139-173; or complements thereof.

48. The silencing element of claim 46, wherein the least one strand of which comprises a polynucleotide that is complementary to a nucleotide sequence comprising at least 70% sequence identity to the sequence of any one of nucleotides SEQ ID NOS: 139-173; or complements thereof.

49. The silencing element of claim 46, wherein the least one strand of which comprises a polynucleotide that is complementary to a nucleotide sequence comprising at least 19 consecutive nucleotides of the sequence of any one of SEQ ID NOS: 139-173; or complements thereof.

50. The silencing element of claim 46, wherein the least one strand of which comprises a polynucleotide that is complementary to a nucleotide sequence comprising at least 70% sequence identity to the sequence of any one of nucleotides SEQ ID NOS: 139-173; or complements thereof, with the nucleotide sequence comprising at least 19 consecutive nucleotides of the sequence of any one of SEQ ID NOS: 139-173; or complements thereof.

51. A composition comprising a silencing element comprising at least one double-stranded RNA region, at least one strand of which comprises a polynucleotide that is complementary to:
(a) a nucleotide sequence comprising the sequence of any one of SEQ ID NOS: 139-173; or complements thereof;
(b) a nucleotide sequence comprising at least 70% sequence identity to the sequence of any one of nucleotides SEQ ID NOS: 139-173; or complements thereof; or
(c) a nucleotide sequence comprising at least 19 consecutive nucleotides of the sequence of any one of SEQ ID NOS: 139-173; or complements thereof; and
wherein:
the silencing element is adsorbed onto LDH particles; and
the silencing element has insecticidal activity against an insect plant pest.

52. The composition of claim 51, wherein the least one strand of which comprises a polynucleotide that is complementary to a nucleotide sequence comprising the sequence of any one of SEQ ID NOS: 139-173; or complements thereof.

53. The composition of claim 51, wherein the least one strand of which comprises a polynucleotide that is complementary to a nucleotide sequence comprising at least 70% sequence identity to the sequence of any one of nucleotides SEQ ID NOS: 139-173; or complements thereof.

54. The composition of claim 51, wherein the least one strand of which comprises a polynucleotide that is complementary to a nucleotide sequence comprising at least 19 consecutive nucleotides of the sequence of any one of SEQ ID NOS: 139-173; or complements thereof.

55. The composition of claim 51, wherein the least one strand of which comprises a polynucleotide that is complementary to a nucleotide sequence comprising at least 70% sequence identity to the sequence of any one of nucleotides SEQ ID NOS: 139-173; and complements thereof, with the nucleotide sequence comprising at least 19 consecutive nucleotides of the sequence of any one of SEQ ID NOS: 139-173; and complements thereof.

56. The composition of claim 51, wherein the silencing element is loaded onto the LDH at a ratio of from 1:1 to 1:5 silencing element:LDH.

57. The composition of claim 51, wherein 60% to 90% of the silencing element in the composition is adsorbed onto the LDH.

58. A plant cell having stably incorporated into its genome a heterologous polynucleotide encoding a silencing element, wherein the polynucleotide comprises:
(d) a nucleotide sequence comprising the sequence of any one of SEQ ID NOS: 139-173; or complements thereof;
(e) a nucleotide sequence comprising at least 70% sequence identity to the sequence of any one of SEQ ID NOS: 139-173; or complements thereof; or
(f) a nucleotide sequence comprising at least 19 consecutive nucleotides of the sequence of any one of SEQ ID NOS: 139-173; or complements thereof;
wherein the silencing element has insecticidal activity against a plant pest.

The application's sequence listing, which the Patent Office published only in electronic form, follows.

SEQUENCE LISTING (395 sequences)

SEQ ID NO: 1 - DNA, 17423 bp, Bemisia tabaci
  source 1..17423: mol_type = genomic DNA
cagcccgccagctctccctccaagccaaagccttttttccagactcgccggccaatcctatcacgctatcagttgatgtcttaccttcgtccgagaaggggcatgaagttttacgctttcttcccataaatctccgataactctttatctcgtgcgaatgtttccgattgtctcgttctagtgatcggtgcagttttttcccccgggccaagttttttatacttatattcaatgacatgaaattttagtgcagtttaattttttcccaccttcctgatgagagggtactgagtgtttgttacgccaatgcttcttcctcttaacgatgtattgctgcatgatgccgtcagtcccgctaaacgtaagatttctcactttcagtaactttcttatcgtttgatttgcacgttggtgtgttacatgcacggtaaaattacgaatccacgtacttcgattacgatgcaccaacatgaataaaaatgaaaatctctcgccaaaaaactctacattatagtatgaaatatttagagaatatctttgaaaggatggcgaaaaattacacaaaattttgtgtaagaacgtgatctaaaaaaaaaacgtgattctcgtgtctttgaaattaaaaagtctgcaatgttgtaagctgagatacgtgctctcgtgattttacgattgatacatttcctcttgatctttcataattagctgtatctcatgtatctcatctctttctgaaagaaacttttaaggacttaactttgttctcactaccttgctacatgctacatagctacatgtttaaccacgctgcaggacaatgtttaagcgtcccgaactaataaaagtaaattacaggtaattggttcaaatatatacatgttattatcatatttatttttaaaataaaatcagaaaaatgaaaaatcgtatgcgttttctgagacttttattgatagtaatgtcattgtactactctttaaagaaaagaaaaaaagaaaaggcatctctagattgtcttgtgttttttttctattatttgccgaaatgtgtgggtttttttatggtatgtgatgatgtgtaaaatttaaaaggttcaagtgcccacagaggctcgaagggcttcggggggttggaatgcgaagaagtcggggggcgtgctccctggtatatttaaattctaaacaaacgtggattaggtatactttgtaattaattgtcatcaaaactgcggtaataatatagagttccttcgttaaaaactcgtagaacctgatcttttaagtaatacttacagacttgtttaaaaaacttaattcgttcactctgtcccccaccagtgactttatactaataataatagtatataaaactacttacctctgtctgtgacgtttcagattttctatcaaattttctttcattatggtgattcgatggttgccattttttgtgtcagagtgacgtgcgatatatagcatcaattcgtttcataatttcaactactcttcatttttctcgaatttggaaatcgtacttctgttgtcatgagactaaagaatttatgcaccaaacttgacataaaaaattcaacgtatttgaggcagggtttttttagaggaaaaatatagcattcgatactgatatcgaaactgcacttgaatgcgatatttttcctctgaaaaacccctgcctttatgactttgagtttctttgtcgtatatttggtacatgaattctttagtctcatgacaacagaggtgcgatctcaaaattcgaaaaaaaaaaaaatgacaagtagctgaaattatggaacgaattgatgcgatatatcgcacgtcaatctgacacgaaaaatggcaaccgtcgaatcaccttcagtaactactgaaaatcagctttgcgcaaaattaaacgcgatttttcttcgcccttttgagaaaattatttgatttcgttccaaaaagtatcggtacacttgctcaaaaatcaaagtggcaaaatgttgaaaaatgcaccgcaaacgaactatcttttcttttagtttcattgttaatgcataattattacactgtgctttttcgtcctatacgagcctcctatagtgttttaaagagctgctcatgaaatacgtaacactgtagggacgaacaccattttctttttacttaagtacaaagaatagaaacctgattcttgaaatcgttacgaaggggtgggggttaaaaattcctcttccagagttacgtactttatgaacggtcccttatttcgcagtctgaggttatttaattgtcttcgaagtgatttacttttatacttttctgatatatcgatgactaaagtcgagaaatgtctttctccgaatttcgtcgttgaaaatattcgctcttgtttcatctaagaatagaagccctcagtttttctgcaaaatacctatgaattttcctcatgcactcttttacattcaaagaaaatgtcagaatctttaaacgttccaatggagacatgcattctttggctgcagccatttattctcgtacgtttagaaattcggtgtcgtatactcgcagctctcacaaatcttccggtatatatatctagctcaagttaaaaatctagtctcaacaaagtcaccacacaaatgtgtagcactgaaattttaggttgccactttctcggcgtgatatatttttttttcttctttttattttttaatgatcagttttaaaatgaatattcctggaaaaaatgtccaacttattttgtgcttaaagcgaaagtaacgtcgattttttatgtataaactattgaaaattctttgttattccaaatgaatcgcacaaaaatccatgcctgattggaatttcgagtatgaaaggcatgcatcacctctagcaaggaggaaattctcatcctcccgaaaagttcaaaaacagagaattttcaacctttagtgagctcacagattttcaaatgacttttctaaattccactgtaccataattcacacactggattttaaatatctcaggagcctcccagatagctcttcacggaatttattcaactcctcttttcgtataacacaaaacgtcgaatgcgcaagacttgtaggtatactctaacccttttattttgaattggaacagttaatttgaacgtttctctagaataatggagaattgcgtgtcaaccttttccagtagaccaattgaattaccgaccccccttccaagaaaaagccactttttgtatttatttcatatgtaggatataacaacggtcaaaaatttgaatttgtgttttccaaagttatattcttgttaggtactggatgcattgaaacgccctgtatcagctgccagtaatgtaaggagcattagaccaaatgggtgcacgtgtcattttttcctgcattccaatgagacctgttgttttgctgtatccgttatttttcgcgcctagtgaggatgttatctacctcagacaggcactgcagcactatcaggaaaaaaacagcttcctttttggttatcaaagattctacttgaggaccgctgtgtcctgtcatcaggttgacgagtaacgtgatggatcttgcataaaaactagtgcacttttcctagttgctgcgaattgcggactttagcgcgcctttgggccaacgctgccagctggcccccgcccggccaaaatgcactttggaaaagccaaaacttgggaattggaatgtttgtaatctactgttgaggatattctgaaatgaacgtgggaaaaagaaatttcataagtgtcgcatcatgtttgccaaattgacgtgaaaaactatattttcaaagactttattattcgtgtctccgacacctctgaaactttgcgctttacgggcgaaatttcaatctggccaaagtatgtacgcggacttttgagagattctgatttttacgatttaagtcaaagtaaaaaaaatagcgacttatttcagttctaaatattttagggataccgtaaaccttttggagaccatgcatacctcccgctaagtatccgaacaggccatgcactcaagaccacacttttattaaaaggtcggaggccttgcaattaaaatacatctatgacataaaacaacggtacatctatcggttcattcgggtcatattaattttcaagttggggaagaggtgtgctcttcaaacagaattgaagggcttggaggacaaggcgcttaagtgcagtttctgatatctcgaaaatcacgtgtttctttcaaaattaaatggatccttatggtagaaagaaagttctaattaactttttgatgcttaaatattggaatttgggagcaaatttctctatgcatccagactaattttacttgaaatcattaatacctcaatttttttcaaaaactgcacttatgccccttgtcttctaagcccctcaattcctcttctttttagtgaaatcagctcatctgtattgttgttgctaagaattcagatgaataatcaatttttttatcccatttgtgtatacgaactcccgtaaaaccccccgtagtatctacagagcgcttgtagaaaaatttgattctcacgaaaattcagcaaataagcaaagtcatctgggagcgccgccaaaggaggtgagggaggagaggggaagagtaattttaattgaaagtatctttgaatatatgtatttgacgtgacatttttacagaaatcaaacagtttttgtgctctttataaaatgggtccaaataatttttaattattcacgcacgtgatgaatgcagtttactaagttctttggcaacgcttttgaagttgtttgtcacaagtctcacttgtatcgtatcttcactatctaaccatggttgttttgattttttcatttttccggcaaatgaattcagaagtctacacgtggcagtcttgcccgtgaaaacaacatacctgagatgttaacattttcactgacacccatgtcctgtagcctgattgtcgaaacgttgtatttgtctattggacacgacaaaacaaaggtgtaatggagctatgcgattggtcggtcgcttgggccgcggtcgcgggtcccgctttctcattggacctataaattctggctcatctgaaaaaacacttatgtgcataaagaaactaatggcacatacgttgttattaaaccgggctggaatttatagttccaaattgcaaaatttagcccaactgattgtctgtcactaaggggtacctctagccagtcgatatatcggtccgaacaaggcacgaaagggcggaatccgcaattgcaatcccttcaactgaccaatcgcatatttccactacaccttagtcttgtcatgtccaaaagacaaataataaaaattcaagaatcaggctgcgagcctatgggtactttattttcagatacagttataaatgcgacatgacttaatgcataaaaaattttcggtcatgtttatttttttattcaaaagcaactaaccaaaataagttactgaatttctttaaattgaggcactggatgcgaaaagagcacttctcgattgcagtgtttcagaatctcttttgctaattaatccattggagaggaatataatgggtgattttgccagaattctttccataggaaattttagaatcctaaggaatattcagtgaaatttttagtgaaatagatgcattcactttccttacaatgaatgaaatattagaggagactcttaaacactgcaaccgagaagtgcccttttcgcatccagtgcctcaattttgagtgagtaaaaaaactcacaaaaatttcaagaatgcctgattcttggttccctttacaaaaatagaatacgagcgcaggtacgcattttcgactttgatattatggatttggctgagcggccaaaaaccggggtaatttttctctgctctattatattcagcctctctccctcaaaaaaaaagggaatgaacaaatatgctggcacgtgttcgattggattgcaacgactgtcagtgtatgataactggtgacgtgaactgtatgacgcgacggataatcgccttcatttttcgccgatacagtatcacgacactcgcggttgcatagttgtatcaagccaaagttacggggaatatacttttaatttttgagttgtagaatcgtatatttataatatctcgactgaaaaccgttgaaagtttttatcgtattagaatgcattttctgtacatgcacagtcattgtcggggctgtaaacaaatacactccagttctacacggtgcgtggctcattggctcaaagccccagcatggagagatcgttgaactaggagatagctgccattaatgttacacctttctgaaaatagtgaacagtaaaacgtatgaaaaaacgtttctatagaatgagagcatttctctgaatgaaattgatacgattgtacttacgataactttcctaaacttttcattttttaaatcaaattttcattgagacaagaaaagcatactgaaacagaactgcaagcccttaagagcaccgaacaaacttcttaactagcaacgtgttgcccttcgatagtgtagtggtcgcgcaatcatatagtctttcacggttgattatatttagcctcgcattcactttcaaccttacaaagttagctccgcacttttacttttggtacacaatcattatcatacactcctttcaagtgagcgaagataactcaattaattttcgaaataatcagcgcttatcttgttcattctcagaaatgcatcttttaaagtccattttgtagtttcgaaaacatgataaaatcgcgttgctgagttttttgttctttttcattagatatctgtcgctttttggttgcctctatttactcctttcacctcctccccctgtaatgattctcgtgattgaccattgcgtgtcactttctattttgttagctctattttacgttgcacgattcaaatgcacatcgcatcgcaacgatctttcgtgaagcagtgcgtcttgaaagcctcgtttgaattccgtaatgtttttcttatcaaacgcttgcatttgcctcgatgaatagcggtggcgtggcgtgctttgcgatatatcgattgatctgccattgaaacctacggaaaagggtcgataaacaggatgtttgtaatgaacacatcaataatagattcttttccatagcttctaatagagaagtatcgataattgatcattcacccctcgccactaatgaatataaggtctaaggacagagttagtgaaagcgtgggaacatctgcaaattcataatagggttcgcgcggttttcctttgatttttatgcattggaaaaatttctctattatttggacatatttctgtcaaacggagctaagcgccatagggagaggagggtagggggagnnnnnnaaaccgggggtcgggctcattccgtcctacactcgcaatgtttttccatggcgcttagttccgtttgacagaacgcgctattcggcattctaatttcctgctgaaagggactaaaactcatacataaaagcgcctatctgtatacgaaaaccaatgaaacatatcgacggtgaaagtcggcaatcacataactcgtttgcggtgtctgaaaatctccgcctctgcgtcatttttttaaaggagaacaaattgatattatttcttgaagtttttgcagaattttcttcgcgctgagaagaaaaatcatgaaagttttaaagaattgccgttgagtagttttccatttaaaaaataaagtatgacaggaagtctgcgacgtcgcaaaccgagttatgtgattgccgactttcaccgtcgatatgctgtttctaaaatgagttcgaaattgtatagttcctgattgcaaagtccatatgtattacaacgtgagctacatttttcaataaggaactactcgcaccgagaaaaaaaacttcgtgcgtgggacccgaagttaaggttatatggatctctgaagttttctgatcacgcatccgataacttgaggtcgagctgccgaagtgcgggtcaaacatctgaagcacttcggtatgtaccggagtgcttcagatgtgtgacctgaacccttcggtgtatatcgaggtacttagatgtcagacccgaacttcggcagctggacctcaagtttttagatacgtgatccgaaaacttcagagatccgtatgacctcaacttctgggaaatgaatggaacattgattggttctataatgagccagaatatgtagttcctgattgacctcccaacaactctacttccatacgtaattttggccctttttcgtttgttacagaaggagtccctcaaactcgaggaaatcaaccagaacgattcggggatctcgccgagctactgcagcggtgacagtcgcggcagcgcccagtcgccggcctcctcggccgaagattgcgggatctccacccggtcacctccaccgctcctgagcatcaaggaccaaaaacctctctccttggacctcagcgcccccaaatcgccgcaacccgccgttgccctgtcgcagtcccagatcaacctcatccgcagcctcaccttcgcagcgcgatcagcatccgcagccgccaacagagacccatcacgagactcacctcgtagcacacacaacgaatcacctcaagagaattcgtccagagccaccccggatagaaccttacatggcacttcgttcgaagcggcatcgaatgggacttcacatggcacttcgttcgaagcatcgcgtggcactacgttcgagggaacctcctacagcagctccttcggtggaggctctgcgttcggagccctgagcggtggcactccgcaaggcgcccccttcggcgcttcgaatggaggcagcgcttcaccggtggctttccaagttgagagagcgccgttgggttcgccgcggttgaacgcccacgattcgagtcggtcaatgtcgccggccagctctgtggattcggagtcgtaccaagatcgggagcatcccttgcagcagttggccctggtcgtcaagcgaaatgatatgctcatgcccgcaccgccggagacagccgagaccaactcttctgataagacgttgatacactgtccactttgcaattacaccacaaattcaaggtaaacgcaatgttcagtactagcatccatcattgtgatagggttaagtaatatatgggtcttacagcgtgaaaaatatttgaaatagccacacgaggcctcggtttatattacatcattttgtaaaaagaagcttaaacaactgactcttgtgagaacattttaattttgagagcgataaagagtttcattgagttatcgcaatccttggaaatgataccatttaaacgtttttacatcactaaaaatatagactaggtatggttttttttatccaattttctgatactataatgaaacgtaatttattcgacccaaatgtatttttcgccatgataaagtcatgatgaaatcttttaaatcctcctgaaagcgcattatttttgatttcatcacaactttgaagcttttgcaagcaatttcaagtagctggaaggatttttttactcgctgaacttatgcggaaatctggcaatcataggtcaatctctgatacgactattgcaacgtgaaggaactgttcttgcctatccaccggaatgaaggcgaaccacagtatacggcctggagctctcatttcaatcggttaagcgaaaacagaacccatccggcgattgtaaaattgttccgcatactgctttgatgtatctcgattgcattgtttaaacattttcgcttgtattattattttaagagagttttatcaggcatattgttgtacgaactttgtagagaatattcttgaaagatcattgaaaaatcacacggaactcacaattaaataaaaataattcttcaaaaaggtaacacgcgactggcaattaacaacattgctaaccgagatacgtggttttgtagttcgatttcttttcatttaattttaatttgctgttgttttagtaggtgggtctgcttgtaccattgtactattgcaccaaatgtgtttcagtcactgttcccttggttttcataggaaagtaatgacgcagtaattgtcatgtttcacttttcattgcagatctacattcaacgcacatcttcacgcacacgaaggccaaaaatgttgctacatctgtgaactaatgactgagtcagtagaagagttgcggcaacactaccaaaacgttcatgacgtcaacgtttcagcggacttcctgaaccatagctcgggtggagaagaggagcaaggaattacagtaccaaagctaaattctcaaggtataattgaatattaaaatttaatttaagtctactgtacttctctttggtttttcgggtagtgtaaaacggatttgaggcgtttaaaataaggagtatcttaaggcgtgagagatgaagtgagattttttcgaaagggagagtgtgtggaaaagaaaacacctactaacttcgtcctcaaacaccgaaacccttgaaaaagaagatataatttttggcccaaattttatccccaaaacgcctcccttgacacaatggaatttactctgttccctaaaaagttcaacttagaaaagttcgcagtgctaaaagctatctatcacgttttatgaataggcatatgacacaactattgacgtattcaacgtgtttataaactaagcactttattagtattttttactaatttatgagactcaactacgaaagcacgactctgcacggaagatgaaggctaatagtgatagagcctgataggtatcagaatgtctggctacgcattctctccggaaactccaacagccagtaatagaagtctggcactggcaactagatttctggagcatttaccagacgcacggtcagcactaccgaaaatctggcattcgatctcctgatgggtacgtatggtcagaccatgtagctattgccaggctgtgcgacacacaaaactgatagtattctctgtaattttacttaagttacttaggttacttaagttacttaggttacttaagttacttaggttacttaagttacttaagttttactttgtatacttaggttatttaagttttacggacaagttactgaagtttgacttagtctacttaagttacttaagtttgccttagtctacttaagttacttaagttttacgtggtttacttgagttatactcagtttacttacgcattctttactttttgggtgttctaggtaaggtgaagaagcatcggtgcaagcaatgtgggatcgtctgcgtgacgaaactggaattctgggagcactgccgcgggcacatcaagcaggagcgactcctgacctgccccaagtgcccgttcgtgaccgagtacaagcaccacctcgagtaccacctgcgcaaccacttcggctcgaagcccttcaagtgcacgcagtgctcctactcgtgcgtcaacaagtccatgctcaactcccacctcaagtcccactcgaacgtctaccagttccgctgcaacgactgcagctacgccaccaagtactgccacagcctcaaactccacctccgcaagtacaagcacgcgccggccatggtcctcaacccggacggctccccgaaccccctccccatcgtcgacgtctacgggacccgtcgcggacccaagcagagaccaaagaagcacgagagtccaaagaagatccaaacgacgcagtactcaaaccaaacggcgttccccaatcaaacgcccccctcgagtcagatgacctactccagtccggcgttccccacccaacccaagttcctgtcgacccagacacacttcccaccgagtcagttcctttccgttccgccgtcagttccgacgatcctcacgcccaactcctactcccccacccgatcgaccctgtcacccgcccctctctcgccggtccaaccgcggctcgctagtcaaaccctgtcccctagtcagagacaatctcctaatccacccctctcgtccccgcagacgtcacccacccaattcccgaaccctgcgttctcgagtcaaccctactccatgttccctgcgaactacgggctctacccgccgttctacccgctcgtgccgaactttccactctcgtcgctcccgcttcttcagctggacattccggcgcttctggaggaggccaagcggtctacggagacgctgaataagctcaaggagttgctccagtcgaacaacaacaacagtcagtacatctccaaagcggtcgcacagcagatcatcgacgaggcgagttgtccctcgacaccagcgagtgacgtcaactcggctccgttggacttgagtaaatcatcgggcaatgatggtaatacgagtgcgtctgcaggctcaaaccgacgtaaaggcaaggctgtaaagagggtgccggtgcactccatgtattacgatgatagcgatggtgaaaggtctccagttaagttcagcgcgcccggaatgctgcccggcgcacaaaagatttactgagcctctgtattcctcaagtcagtgtaagtgtttttcaatttttgattgtgtaagaagaaaagcaaactataggaaatattcgcattcaaaatgataggagataggaattggttgagtagctaaaattttaaaagtcaatgcagctacgtggacgccatgcagcaataatgatcattacaccattataacctttcgaaatttgcttccatattttattttctataagaaaaacttatgacgtattaacggtccaagttttttgaaatctctctttccctatgaacattattctcaaaaattgaccaatgatgttgcgtggttttgctatggaaagtaaaatatcgaacaaagcacctagtctattctaattagctttaaaaaaaaataaataaaataaaaaaaaaattatagtttttagcgggtacttaaactgagagccgagtgttgatcacacgaaagtagagagctcgtgacttaattttcaagtgatcagcactccatttagtccattcgtgaaatttcagtcgaattttacgcattgtccgaattcaatctctttggctgtccgttttcaggtctctcaagtttaaagtatatgaatggacgtcctaataccaaataatattatttttgatgaatttcattagtaacttacatccatcagtgtaactgcgttcaagtaacgtctgaatcataagcaactcaatatattctctcacagcctattttctatctccttcatttttcaagaatcatataccttgaaacttgtttcagatttttgacgtaatcgctccgtcagattaaaagatcagtctagatctatcttgtttgagtttgattcgtttatcccacatttgtaaccagaattgcatcattcatttctcttccatttatctcacaagtttgcatacctatcagtagaacccagaaattctctcaccgatcaaaaatatttctgcttgtcagttgttttgaacttgtagctggagataatttaatttcaagagcgttttctgaaaatcttagctccttttaaatcctggttaattccttcgtgtattaactgaaaattctccttgattatcattccaaataactatttatcctaagtttgcttttctctcctttttggggggctcgaaacaattacgggtttatctataagactgccaaattgcgctgaaaaattatttaattcagtttagtattggctccattataactcttaatttcaattacttaactaaatcttcttaaaatgacgtctaaaattcgcacattattaacgaaagcttcattggggggaagtttctaaagaagcatgggaagataggtttgacactcgcaaaagtaatttcaactttaactgacaattcataaaaaagaataggtacacattcaaaacgatgaatttataaattgggatattgtcggcttaatgcattaggaatttaacgatcacgtgcgaatggttattgggtataagtgtgtcatccataatacaattgtcaagagcttatatttttaggacttatcgccttttgagcagagtttttcacgaaacgctgccagttttcgtcataaattgttctcgagacaatattgtcaggttaagcaagtcagatgcccaaacctgttccgaggtctggtatggtcaactgatgattctataattcaccgggcgtcaaagcaaagttttgtatagaaacatgagggcttgagttaatgttagcgttggcgtcatgggatttactgttagttttttgcgccattttggcgtgatgactagagaaactaccaaaacgactctttaatagatgtgtgtgctttcgaggagggaaaccccaaattcaccagtggttattatacactcacctttgccaaggtaacactgtggtaactcaattaagcaacagctaatcgatactctaggatatacgggaaagtagttctctattaattttgctggttacaaatcacacaaaacccttaaatcgttactttcctaaaacggactcttgagacatcaaaattcttattcatcccttcttgattttgtacgtgtgctttcaattttcatgggcccttcaagtcgaaaaaatctcaacgttgtcccttttgtcctcaattgtgtcgcatctattggaaaggcataaaatatcatgaaagacttgtgaatttttttgattgtgagctttaggcagatttttttttgcccgaagtatggtttcctgacaactctgacaatgagtgaaaacgcaattattctagcgctgagtgcgagaagggcatttcttagtttctgcgatttggaatctccgccgacatttcttgtgatttaaagagaaaaaacgcctgtctttttttgaaacttatactgaatattctttatgattttacaattgttcgaacgaaaaatccagaaaaacaaaaattggtttcctccgtaaaattcaatttaacagcgaggactctgcagaaacgcaacctagaaatgtcatttcagcacccagcccctctattctcttttcaccataaaataatgactcgttttttaggaatcattgaacgaatgaaaatggttgaaactttgtacgtcattttctcaaaaaaatttagttcgtaaaaatggatctctttgagacctgaccagtagtttcttcgcaaccctatctgtcgatttttcggaaataagatgtcaacattttcatagcattgttcatattttaaacccaagcgcacgtgtttgtaaggacttcaattaagacatgcattgattaaaacatcttcgtgagatggtcctctctagtttgacgtccttcaataattgtcgttagagaatattttcagtggcgtggcgtgaattgcgatgtatcgattgttgccgtttaaacctatggtaaagaatcgattatttaggtgttcgctgcgaacaccctgtttatcgatccttttccataggtttaaatggcataacaatcgatatatcgcaattcacgctacgccactgaatactttgatgtcacactcgcaacgccaaaaggcgaaagtccgtcgtctgatttttaaggtatctcatgcgttatacccacgaaagtgttaatcgagaagatatacccgttgaagataagatatgaattcactatttcactattttaatatttttaattcctctccaaaatacaacgctgcgagcacgtatcgtccttggactttattggtttgatctcaaagtgcgcaagcaatcacgtcctgtatagctaatctttgaaaccgatttttgaaaatcattttgatacattgtcaccggcttgatacctggtttgttgaaaaatcgttgagactgagaggataagtaatctttttgacgatacttctgataaaacctaacaattctgaaacttcaaattatgtctatacttcagtcaacttgtgactatcgcgttccttacagctgataaaaaaaaaataaatatgacattaaatgaaaaagctcaagtaaagtgaatgggacaaatgaagtccaaaattttgtgaagagtatatctttaattcttgtaatctctgaatattatgtaggtttggatcaaaaatattaacatgatgctgaggcgtaaagtaaatcgatgcatgtcgctgtcattcattattagctctcctgaattttttctctcatttttttttttaaatttgattacactgtaaacctttcactgtcagcatgaatttttttctccttttcacttatttatgttagtgattttttctcctcgtttattttcaagactgaacaactcatggtctgatttttattattttttacttctcggtttatttttagttccaacttagtgttaataagttgtccttatcttcatttcctttccagaaattgttctcttttccttttcatctttagtctaagcaccttttattttgttgatcttaatattcctcatttgagactggaactttttggaatgagtttgagctccaaaataaatcaagcagggatttttatggaatttattttcatattcaagggagattttctttaaaaaaagcctggtaaaaatatagtaaagtgagacataagtgaaatcctaagtattagacttattttcttctcatgttttagttgtctaggaggaatttaaaattacttcaaaatcggcattaagatgttaatatagcagccgattacaaaactgatcttactccaacaccttgttgcatcgcgcttcgtatttaaattattccaaacttattctagtttcaatataattttccaaatatctgtagtgataggtaaataattttatatatgtagtattagctactcagatagagttgtaaaacttaattatttattaaaaatacatttttatgaaacgaaaaaaaatccaagatttgatgtgttgaaactaataaaaacttactgactcttttctaaaggcccacttcttacgaaagggtccaatgacataattacctacattctgtagacacatggaatattttccaaccatagctttaatttgcaattattttaaaatcaaacgtttcagaggcacgcattcaaaattttctctctatctctatcgattacagtcatatatcatgcaccccacaaaaagaaatgggtgagaaattgtaaaatcactaatggaaaatcacgtgtcattaaattctcttccttcattattacagtaatttgctatgtaagattgatatcagggtttcttaaaattttctgaagtgatgtaacacgtaaaattaagtaatgtttgcgc

SEQ ID NO: 2 - DNA, 12232 bp, Bemisia tabaci
  source 1..12232: mol_type = genomic DNA
ggaagacaaggagctcagtttggatagatgcagcggtcaaacgcgtgatgagtctgacgaaagcgagtaatgtctcagtttcagctcagtgctcaactgtagagctagtatgacggataagtagtgaggtgaggtgctcattcaggattacggtgtcatgcttatacccagatgtcatctccggcagtactatgctgctgctatcggtacgttaaatctgtagtttcgtcaaaacgtggaaactaatttacggataacttcaatgatagtgtttggaaacagaccgctagacgtggtaagaatacaagtactacaagacacgtttcctcacgaaattgtcacagagaacgcgttaagcgtatctaaaatttctgaaatcagctcatacaagcaaaattaggacttgcagttcaaataaagtcatccaaaatttccgcccgtgagtgaaatcaaaatcaacgaaggtcgaatgggatatagatatccgtcttctttgtcgacaaatagttttttttgcgaaaaaaaatcacctgtattgcacacggaattcaaaaaattattagaatttaacccaaggagcaatttttgaattatgaactttgcccttggacccctggaccttgggtttttttgaaagtgggaggttgtgttaatgaactcaaaaaatcaatttttctcgtatgagttggatttgaaatttactaatacgttcatcctgttgcgcacaaaattttgatgaggaaacatatcttgcggtgcttattatcttactattgtcattctttcattggttttctgtgtagcgagagtgaaataagattcgtgggaaggaagaagcctattcggcagttaagtagcgaaattcctctcaagagtaggcgcaaaataacatactcatgatgtttttgcatcgtcgtcattattccgatgcacaaaaaatacataaaaacaacatccgaccgttcagaatgttcgaaaacgcacacataaacaaataacgtgcatatgctttttatcgaaagtaattactctgtctagaaaggaaataactgttatatttataccttccataataatcgaagacaaatgctgccgtactaaggaaggacagcctatgaacattgaaaagttaccatagttttccgggtgaatcgtgtatccttaaagatagttacgaatattttctctcaaaatgttcagaagttttcgattaaactgcgaacaaaatgtcctgcaaaattggaagaataataataataatcataatacataaacatgtttattatgataaataaaattaatattacttaatattgattaatatgaataataaaacaaaaagttaccgtctttaaggcgtggaaaaagttaaataataatcaccaattttccaataaattcgaattttattgaagagactttggcaacgcctgaagtttcatacgacgattttccttagcacctctgcactgcgttcttgtctattctgcctcctctaaaattttagtcagaaagctcctcttgttttgatgcaactagttaaattagagaagtgacaccgcgactaaaagcttctataaaagtttaaaaaataaataaataaacgatccgtcggccagagtgcaagcaagccgacgtccccgaagtaagaatcagcgacgaaagtatagtcgcgcttagcaattacttaaagatacgagttacggcccacttaatggggtttgtaattagcagtcgtgtcggggctgccccccccccccccccccccgcgggagggggaggatgcaaaaattaaaaagctgagccggggcttaaaagattaaaattatctcggctgctccgcgttttggatgggacgtgctcggagactcattaggggctgcggccgggctcggcggattggcgcggtggaaagctacaccccctacccttttcctcccactctcccccggggaggattagttttcacgcgtgccaaggttatcggtgaaaagcgctcgctctcaaatctcccgtcaagattgatacatggcatgcaaagctgggcgcgggcccccagggtcgccgggattaataaggaaataccgtggcatgcgtttcgcaatcggaccctcagatcaatggaccactagacaaggtacgaatttaaggtgattcgatggacgccatattttgtgtcggaacggcatgcgatatatcgcatccattggctccatttttttcagctactcgtcatttttctccaattttgagatcgcaattctgttgtcaggagactaaagcactcacttaccaattttaacaaagacattcaacgtaataaaggcgtggtttttttagagaaaaaaaattgcattcgagtgcagctttgatatcagtatcgaatgctatgttttctctctaaagaaaaccacgcctttattacgttgaatttctttgtaaaaattggtaagtgagtgctttagtctccagacaacaaaattgcgatctcaaaattggaagaaaatgaccagttggagtagctgaaaaatggcaattgatgcggtatatcgcatgccgttccgacacaacatatgtatggcgtccatcgaatcaccttaattttcgtttcaatattcgtgttttacgtgaaattctgatgaggaaacatttgccatattgcttaaatgcgttcttctgtctagtagcggtccattgaagagtggaaaattcaaaatatcctaatcaccatcgggtattgctgaaatggacctttagacaggtatgatgaaaattgtacttgtagcgagattgagcaaatatcgaggtatccaaaaactttgtaaaaacactagttgtgctttttactctcgactttaaaaaaaggggaatagaagaagaaaagagtcaaaatagtgtaaaagtgtatttcagctgtctatttggtaaacattttcttctggaggaacagatgcttagtctcagcaacccaggatgttggttatgttttgaaccattactaaaattacgatgatcttttacaatgattgcgggagtagaaattcttgatcataagcaaagattctacagagcgcaggctgagtggcaaggatgaatcatcgttagtcgttactgccctctctccaaaatttcacgtcaaaacaattacatcacaaaatgtttgagtattagttcccccagaagctcccagtgcttacaatttatcatgaaacgcatttctaaagtgaccatatttatatctttcatatcagttctcttttagagttgtgtcccaatcttcacatctttgtcttgttatttttaattttttgtattttaatccccccccccctgaaaaattttgccaagaaaattcataatctaatccttcaattcataactccgcaacagggtcctttctcattcccaccggtctttgacctttacgttttcatgatgtatgatgatcgacttacatggaagatttcaactattgatgaaataccgtgaaaggcacgtgttgatgtgttcaaaatgtgcttagtttttttttgtcctcctctgcttccccttcctcttctttttctttctgctacaagagctcgtgcgttacaagattacttagtagtataaaagccatttcaagtaaatgccaggctcgaggttttcaatatcaaggtctaattttttatcatccgtcgataagatgagtaaattcttgattctcggaatgatatttagcgtagtaagcattttgtcggtgccctaattatatcataggttagactagttcagaggtagccgaatatgtcaatattctgtaccttttctcattttaatgcgatcaatttttttttatcactaaaagtttggtaagtaaacattgataggtttcccatccattgagccaaattttttcagcaacaagtatttttatcagtatcgggcttattttggcaatttttccgtgtctcataattttcactcgtcgacgcccgaacaatttaatttacaacgtacacgtaagtcgttagacgtcaaatgcagatcatttaaaatttactgcatcgatgatgaaagtacaagagcacatgtttttattaaatatattacaactccgtttacgttctatttataaaagaaagaaaaataaacgaagtaaattaatcgttggctttagctctctagaaaaaaaaaacaagaagaaaaaatccaacatgagtatgttggaaaagcgtgccgaataactgaaatgttggacaaatacctcttattttcacgtctttgctttttgcatcaattggtactttttgctaaatttgggagaaaatattgattcatgaacgttgaatgtaaattaattttaaagattccgtccaattatcttgattttaagctgatatgcggcatttgcgcacgaccgtgatttgggcgaactgccgtgcatcgaaatcgcgttcagttaatctctttggatttcgaactgtaacttctctcctattcggccgatttgtacaatttgtttggtctctttttatttgtacttcaacggaaagtaaagaaaaactcgctaaatagacggaaaacaatttttgagaaaatttggtggatcctggcatcacggtgaatggttaatcggttaatcgcctcgccgtcttttattgcctagattgctcgaaaccggacacccaaagctatatcgcgagataattgtagtggtttaagtggatttcggcaggggccatggttagtacatagtataatgagtcacgaggctcatcacagattgcacttacagtgcaagacgctcattggctatagagttttggcgggaaagaaggttctagagttgagtcctccgagcgtaagaaagctcctatgaggtttctgtaaaattgaataatacggttttgacagaaaaatgttctcaagggtttccaattagcagttcattagattttttggtaaaagaccatcagggcttgacagtgtaatggttcaaagacaaagaaacgggtgcgaggaaaaaagtatttggacgacccgttgaatagcattggttgatctgtgtgctgtactatggtacatccgagtgatttcaaaaagcgagccctactggcacgcttaaaaaagaaaacaagaagaaacatccaacatgaatatgttggaaaagcgtgccgaagaactgaaatctagtgtgtgcactttttccatttcaacgagatgtgtataaattagtactctctgcaaattggggaggaattattgatttgataccgttgaatgtaaatacattttattgaataaagaaagtaacataattatattggatgaacaaagaaaataacatcataaatcatttaactgaattggttcattcagaatttcaaattaaagtttggaaattgttcagtttgttgcgtcatgttggagattgctcagtttgcagcagcagagtatggagtttactctgtttaatgagtcaaactttgtcttttctcttttcttcgattgatttgtattaaaatgagactttaaggtatcttttctggaaaaaaaaaggagattgctcacttcgctgcagttgtaactatggagatgcagccaacttgggtttaaccgcttttgaaaagacgctgattcgctaaatagttatggcggcatttaaacttctaatttaaatcctccgagcgtagaaaagcttatttgacgtacctatgaaagaaaataatacggtttccacgggaaaatgttctcaagggtttccagtaacaggataattcggtttctcgatgaatgaccttcagggcttgacactataacggttcaaaaacggaagaacggatccgacggaaaaaaaattcggaccgccccttgaaaagcattggtcgatcggtgtgctgtactacagtacatccgagtgatttcaaaaagcgagccctataggcacgcttaaaaattaacatgagtcgagataagcgatgttactgtcaaagatacgcacttatctgcttcagctgtcttttttagtatctcccaggaattttgcattgttcatgagctttttttttacgtcaaagatgtttttcagaaaaactcaatttctcaacaagcgaaacagtgcaggctcaggtatttctaatgcactgcttcatgctgtcgtctgctattcctattccaattttgcctcatttgcagattagagtacaagctgggctgaagatatgtgactctcttgtcccctttttactattgttccgagcgcattcgatttttggttttaggttcgacctatgcgatttcagttcgacccaggcggttcgcgtctgatttaaacaagatcgcaaataaaactaaatatttggccaacgttacccatagaaaatctatccaaaaatactaacctcacgttcagattacttcgtgttctatttccatattaacacaaaatgctggctactttttcgcaaattctatgaaccccagttcagaatttacccaacttgattgttcagtgtaacttagtaggataaatttttaaaaacggtgactctgagacttttatattatattaattttttatgaattactcctcttgtcttcaatttcgctacatttttatattcttccgaacattgtaacactggaaaaaagtaactccgatcttgagtccagactcttaaaaaatttgataagaaaaaaatactcttgattcaatccgatgtttgcttgaatcgagagccgggaatcctaatttaagcggatttccttttgattcgagctaaaatccgatggaatcaaaagtgctttttcttgtcaattcttttaagagtccagactcaagatgtaagagactttcttttccagagaatagtagggaaaaataataagaatagcaacacgccatcgccgtatttttccgctttcgcagaaactagttatcgaatcgctcgattctaatcccaaggacgaaataccgggcgcaaatcgtgacgtcacgctcacgcatcgtccccccaactcgggccgaccgaaaagggattcgaggaaaagcacccgagctgaaagatgatcccatccgccgggattgaagaggggcctttgattgagttaaatgcgtgctccgtaagttgtcacatcatatcaaatcataaagggactttcaattcacatttggaaaatacatcggaacccctgtctaactcggcagcgttaccggtcgtggttctcccgtgtttacctcaaagctccaccggcaaattctcgctcaggtcaccgccttgccaagttttcaggaaatgcgaaattacaccggtcgacaaatttgtatttttgtagattcaccctccgtgggtttttccgggctgtttccgggtagatttttagcactgatcccgaaaatgattctcgttcgctggatcaggtcgaatccagtcggaaaaattcgaaattttggccggccaggctggcctagtggtcagtgcgtctgactctaggtcaataggtcctgggttcgaatcccggtggtggcgtctaatttttacggaattgacgaagagatctgctgaaacagataatcctcggccataatccctgaatattggaaaaacctggagcatggagctcccatgatgtccacggacactaaattacattgtctaaacttggctgagggtgctatacacgtagcccattaaaccggaagggggggagggggaagtcgaaattttccctaaaaaggtgagctttctggaggaaaagcaatttgccgaaaattctccgctccacttctagggataattgcgattttctggggagataaatcgttctaacgcagaaaaacggagttcattttaggaaccagcgctgaaaatctacgcagatttcgctattactctgcaggctaatttacccgtaatgactggggtgatccaacattttcgttaccttattattttttcattattatttccttttattattttattatcttacttattttctctgtcacttctttcccttattattttctctgccgaagagacatcgacagagacgactatacggtaaattttgtttgcagcctcgctctcggcgatgatgactggggcagcaatgggatggccctcgccggtactggagcacttctgtgaaggcgcccactgcgaggtgaggatgacggcgggcgaggcctcctgggtgctctccctcatcgagatcgggaacctcttctcgccgatcccttgcggttacctcgtggacatgtacgggcggcagccgtgtctcttcgccaccgggccgctcttcctcggctcttggaccctcatcatctgctcccgctcggtgggctacctctacctggcgcggctcgtccagggcctcggcatgggcatcgtctacacggtcacccccatgtacatctcggagatcgccggcgccgacgtccgcggccgcctcagcatcctcttcgtcggcctcctcaacttgggcatcctcctcgagtacatcgtcggccccttcgtcagctaccggacgctcggctacatctccatctccgtgcccatcctcttcatcgccacctccatctggctccccgagtccccgtacttcctcctcatgaacgacaagtccaaggaggccatcaacgccctgatgtggctccgctccgactactccaaggacaggatcttcgaggagctgaccctcatcaaagacgaggtcgagcaggagaaaggcacgaaaacggccgccaagaacaccttcggggacatattttcatcggcggccaaccggaaggcgttcttgatcgtccagatcgccgcctgcgctgacgtgctctccggcatgacggcgatcctggcctacgcctcggtcatcttcgcggcgccgcacaacacgacgatggaggcggaggactacccgatcatgttggggctcatcatgctcctggccatcttccctgccgcctacctggtggacatggccggtcggaggccgctcctcatattctcgtgcctcttctctgggcttttcgaactcgtggctgccttctacttctacgcggccatgaagctggactgcgacgtggctcgcctcaagtggattccactcttggccatctgcgctttctctgtggcctactcgatgggtctgggctcgctggtgcccacgctcatgggcgagtgcttcccctctcaaatccgcggtcctgccagctccatgacgtccatcacgctctgcgccatctccttcctcgtcatcaagttcttccaggtggtcaacgaggagatcggcttgtattttaacttcttcatctacggcgtgagcagtatcgcgtgctcggccgtcttgtggcttgtccttcctgaaacgaagggcaagaccctgagcgagatccagcaggacctgaaagcctcttgcaagcccagtaaacctagtttgccgctttatgtaaacgcctcagtgcccaaaggtgtcgaggcttcgtaagctaccctggagggcagtggcgacttttcaaagtactggatttcctccatttaaatcaactatcaacaacacaatcgaggttaaactatgtgcctcggtacaaagcgatcgctttatttgcatttcagtataaaaacccagttttgacaatttaaaagaatcgccactgctagagggtgctttggtcaatagtcatgatgacattcgggtccgccctcgagtatgaagcaaccccgaaattactcatggctggaaccttgttcggatctggcaagtgcctcaaaggtgggttcccctgacaaataacaatgcttcccaagtaaccttggactgcatcacgtatggttaaattggatgcgctggagcggatcaaaaagttccaagcgcggcgcagctatggccatgcttgaccatagtgtgggttatttgtattggtaaatatacattgccatggcgcaactgtataactaattttatgtataacgtatgtattgtttccgataaaaagaggaaattttggagttctaagaacgaaaaatactgcaaacgcgtggaagcatggaatactattacagtgtccttgtttgcaaggcatcgttgttgcaataatcaagctctctttcagaatgtagagaatattagagtaattaaagataagtcgcgaataaaatcgctgaatctagtcaaaaagatgtgtatgactgagtctcgcaaatgttatcagtaagcttattctgttttaacctccttttgaagcattgtcgtgagttggaactaggagttctatctatataaaaattccacttaagaaggaggagaggagaaaactatttttttcctgacaaattttcttttgtttttcatttttgagcgaaatttatgaaatgtccatttttttaaaactatttgtctccattataacaaaatataccgagctctcctgtaatgtaattttcttcctattaatttatgtaggtaactgaattgctatgtgaatcggcaatgcgaatcactttagtatatccgaacaatattgaaaccgaatgctttaatatcagttcgtctaacagcagtatcagcgtattgacttactattatatattcacaaaaaattcaggtatcagacaaaaagttattattatacgtaatgaccgcttaaaactaatcctagcatcttatgacgtccatgttcagcaaaacatatttttaaaacgtcattgaaagcatgctcgtacacatgcaacctgtgaattcatattaggagaagtggcgaggcatgataatcgactatctatatctccccaatttgaagctataggaatgaatctattgtaactgtgttcgcaaactgtgttcgttgcgaacaccctttctatcgatccttttccgtaggtttaaatggcagatcaatcgatatatcgcaaagcacgcctcgcctctgatcatgaggatgattatcctcggagcgttttcttctcagaaatttccagcgtggaaccggtcaaaagcaccgcaagaatctcactatcctaatcagcaatacttgtcccgttcaacacgaccccaaggtgtaaaagtcttatagttaatgtaatatcgattatagtttacagttgtcttatcatttttgaaacaaatgcaagggtgtcttttataggacctaattttttgcacaagtaaagtatcatatttctcgcaagtgatcggataataaatgccgtcttatctaacgatcaatcattaggggaattctttctagctttcgggtaaggctctcttttcgatggcaaataattatcgctgaattcaattaattttttactgatgataagtttagaaaaatgttttctctctgcatccgatacaattttaccaatatacttagaatttcgagtaattttggaatttagagtttgacacataaatttgacaaaatatgaatgagtcctttctttccagcttagttagttgtgtgtgatgactttgcaaacccacggccgtagttcctcttttcttatgcgcatcagtttgaatgacgtttgtgaatgggaaatgaatttaaaagacaatgtatggaaaatgtcgcatcatcaacattttaaagatttttgccgtcgtagtcgattattttgtaccttattacgctgcaggtactgaaattgttactcatagcagcagaaacagtttctagagattgtcttcttccagttaatatcttgtacttttttagtcgtgtaaattcggttatttttatcaatttgaactaatgtttattctttacttttgaattgtttttcttatttcgtattactttcatttttttcaattagttatttttaacacaacttctcgtgctctattgttctaattgattaccgtgctttcaatccttgaatttcttaaaattttacgacattgctcatgagttttatgatctcaagcacaatttatttaattaaaatttttcaaactcttcatatttcaaactaagtgaagtggcgacgcacgactatttcaaagctcattcactcatttttgtccagtaaccgcttcagatcatctactctgtttagttcctgtcaagactatcgtaagataagccattgaagatgcgtttcttaggattcagtcgtgtagattcaacgtcctaagtcatgccacaaaggcacttgagacaatttcaacgaaaattaggttaacgcacgtggtgaatgtattttttcgacactgaactaaagagaacatcttgttaataatttcagct

SEQ ID NO: 3 - DNA, 15942 bp, Bemisia tabaci
  source 1..15942: mol_type = genomic DNA
atatctccgactgacgtggaaccaagtccgtagtcggctcacgaattcttgcggtatttcgaaatttgaatggtcttatcaagtttttgacgcatttctagtgatccctttttaattactcgttataatttttcggcagtgcaatggtttaaattccactcttgggcgtttcagtgagtttttcatgcccagcccggttccagcattttgaggttatagtggtgttttgtttatatgctatttgacgtggtatgaattttcagatttaatctctatttagatgttctttttcatcctatcgctctcagttttggcattttctctgccaaaacaggagcgtaatttcactcgctcaagagatttttcctctcgagagagcaacgtagcaatcagtcaagttgagggttgataccaattaggcacctgccctgtgaagccaatctctcaccgttccatcctttatgaagctaaatgcaagaaaaactagtccaaagacagctgaatattttgaaggatcagctaaaaaacagcacctaacagcttttctaatgttgtctgttgattgacggatggtgttgacaagtcaagggaggagtaggataccacctgtagttgctacaaagcagattagtctagaattaggtgtagtcttgctccctaacagatgttgattagcacagagaaaaaaaggaggtgtttgcatcttgaggatcgtttactccataacgtaggtcggcccaggtacaccagcaaaatccggaattcgaagtatgaaaaacagaccataacatccaatttttttgccgaaatcaattaatgatatgatttcaaacactttttatagaacgatttttttcggcaaactacatgaaaatcaatgatataactcgcccgcactgacctacgtcatcaaaaaaatccaagatgcccgaaatgcaaacccctccttttttttctctatgtttgatcagtaaaactagtgaatgagaagaggagactgagggtccttctggatgtagctatcaggtttcaaccaatgatgaaatgatcacccgattggatagaaatctacaatctcaatttcaattattttaactcgagacagtgatggttctcagttgcttgttgagccatcaaaaaggttgatgagtttttcaagtgttaaagagccacctatatcgacggtgtaagtcagcaatcacttaactcggttcacaacatcacaggcttcctatcatactttattttttcatcggaaaactactcaacggcaattcttaaaaactgccgtaatttttcttctctttgcaaagaaaattctgcgtaaattttaaggaatgatgtcaatttgttctgccgtaaaaaaataacatagaggcggagattttcagacacggcaaacgagttatgtgattgccgacttacactgtcaatatccttttctggtgtatacttatggacttgaaaatgtttaggtaaatgattctttgctttaccttttgccttgtttttttctggaatttaatattaattaatttgttcatttccttgcagtgaataaaccaatcatggcaaatagcgttgaacagccgtgctacaccttgatcagtcttccatcagactcagagtttcccaatgaaatgcaactaaagtcagatctcggttagtatacaatgatgcttccaatcgctgtttttttatttcattgaagggtttgtttacatcataaactcgaatgttacaaagcaaagggaaaagttttaatactatttttaagtcaatgcgggctgtgtgaaatagaaagtgatgagaaatactgtagaaaaatttaccctcttatagagctgagttccttacttatcccaatgttctgaatatcctttaattttgcagttacattatattttggcctgtgggtttatttttttaacttacctgaaattctgtttttcctgtgtttatttttctctgaaggagattcgtcctggtttctggcatggtcaaaccagtcaacgatatactgcattgataaagtcaaaaatcctggtagattttgaattttttgcccaaaaagagatgatagcccctgtatacgaactaaaaacattattctcaaccaaaaaattggcaaaattgggagaaatgaaagagtattctttttgggtaaaaatcttattttcaataagaagtcaaaattgaatgcgaagtatttttcaaaattttccaactttataagcagaagctgtatctttgcaaattagaagccagcggatatactcaatgacaatatcatacagcagctgtaaatgaatcaaattttttcgtgtttgattttccatattctaacttggcttttttttttttctttctcctatctctttgaatggtagctattttggtatctattttcagtatataattttgcccataaaattgtgaaataaaataactttttgtccgcttttgatgaatgaaatgttttaccatctgaactgagctttaaaatttgcattatttaccctaaattaaattccttatttttatttaaatttgatattttgaatgaatatgttcttttctctagaaaagggagacttgcgaacaaagatcgaagccctgaagaaagttatctacatgatagcaaatggagaaagaatcccaggacttctgatggttattatccgctttgttcttcctcttgaggaccatacaatgaagaagttactccacattttttgggagatagttccaaaaacattgcctgatggcaaattgttgcaagagatgatattggtttgcgacgcatatcgtaaggtttgtatttttctctttagttacatttttaaatgctacctcaaatgagtcaactcttttcatccgcaggttgttgacagtgagaccacagaaaagcgtttcaggatttgaaacatcaaagactacctactatactttacttgtctatgtatttaatagaaaacttctcaaaattatttccttgaaatttctgtgattttttctgtgagtgacgaatattttataaaaatttcaatcatttttccccttcaaaaaaatatagcaggagcaaagattttgaagttactacattcatggtgcatgtttctgcagtttccttatcgttgtgcagtggtatcttagaatgaaatagatgaaaagagttaactcattcaaaatgaggtattattcatggttacatgatttacttcgcaattttgtttcacctgtccttttccaatttattcatagctttttctaaaacggtattacgcatcacagatgttttctctaaaactgtctccgcaactaccaaaattgcttaatagtataattttgacaaatcagacccgcttgagcttggccacttaaattgtgccacattggcagttgctgaccattaaaatttcgggagtggcaaattattttttttaaatttccatatgactttttatagttattgaataatttcaatattttctgaagcatgaattttataagttgttgaatacttacaaaaatgaggaaaataatcattaatcgtcctgtttaaaattgaatatcttgacattcatccgtgacgtattctctaaacattttgcaggatttacaacatccaaatgaatttgtcagaggctcaacgctacgatttttgtgtaagatgaaggagccagaattactggaacctcttatgccagcaatcagaacgtgccttgagcataggcactcttatgttcgtcgcaatgcagttttagccatttttacaatttaccggtgagtttatcatcattttgcagcattccttatgttctgttgtatcttgtattgatataagttcaaagtgagattatctatggctgtatctctttatttcgtgctcttggtcgatttttaaaagtaaactttacttctttttcgaagtgaagtggcggtgaaaatttaatttttcagaaagttgagctgacaatgagtgatggagtactaatttgactttttcacaactgtaatttttattttaaaaaattccttatcacttttgaggtgaggaagcttatcctaagtaatttggagagaagaatgagtgactaaaaggtgaaactcacaaaatttgaaaaaaaacgcaaggagttaaaaaaatctgtgaagggaccattttaaaaaaatgacagtattagtactatagcttatgaacaaatttgtttctgacttaccaacatcagcgcatattgagtagagatttttccattattaattgaaatgcatataggttaaaaggttaagttttaaggtttctttctttcatgttaggaactgcggtaatttttctctggaggggaggggggggtctttgaattgaaatggttagtaccatggaaatgacagaaaaaaggttctttgcatcatcagatcagaatttaagattattatgcatgtattatatgatttacaggttgagtgatttttcctctttgttatctttctcctttccaggaattttgagtttttgattccggatgctccagagttgatcgctaattttcttgaaagtgagcaagacatgtcatgcaaacgcaatgcttttctcatgcttctccatgctgatcaggaacgtgctcttacttttctggcatctagacttgatcaagtttcctcttttggtgatattcttcaacttgtcatcgttgaattaatctacaaagtaagttagtgccaacaattttttttttttttttgtcaagagaaattatttattcgatagataacaagagattttacagtaagagtgccaacaaaattaaatgctcatgtatgtacagccttgcaatgttatgcttgtttgcgaaataatgaaaataatttaaatgttgatgaaagagccacttttcggataaaataaatgtaagatgaacattctccctggtaccagcatctgacagagcacccaaataaaattcctactcatttttgaaccaaagtcaaaacccagttcgaaccacaactaggtagagaaaatgtttctgagactttttgtggaataatatcataccttgtagactaaaagataaattaatttaattagcttgttaggtctatgcacttgacaccattgccaatatgttagaataattagaggtgatttttgtatgatgtgtaatagattaatgacaaggcctattgaaacattcttccctcattttcattggacccattatgcccatcactcagttctcaaaaattatttttcaaatacctgtctaaactgtcttttctacctaatctgatgcatgcttttcattttacatcatgtaaatgatgaattatccattttgtcctaattgcatattttttccctctgcaggtttgtcatgcaaatcctggcgaaaggtctcgttttatacgatgcatttacaatcttctgaattcaaccagtcctgctgtacgctatgaagctgctggaacattagtaactctctcgagcgcgccaacagcaatcaaagtttgtgttttattttatttgtttttcctcaagagcagtatatctgttactatgaacgtcaatgaaaaaatagtgagttatgagggtagaaaaattaaaaaaaaaagattcagctgcgagagtaaaaatattcttagagagtagagctgcagattcgactggtcaagtcagttgccatggcaaaaatgagcggagcctgcagatgctcaggagtttggaggaacatacttgcacagtcaaaagagaaacaacagatttattttttcgttgatttttgtgaaggagagtagtccaagtattgacagtcatcgttagcctgtcaaatgcttagcttgcttacttgaacagcattcatgttgtctctcatgttaaaaatattaaatttttactttaaaaaatggagctatggggatatggtttttttatgttgaattgaatcaaatacttattttgaaaaagtttcgaattcaaatcaagtcgcatatttttacctaagtatttttttctcagtcaaagtaaaaatcagttgtgcaggaccacagctagtattttttatattcttctatattcctctgtccttcatcatattttttctaagataattctgatctgcttctaggctgcagcatcatgctacatagagttaattgtcaaagaaagtgacaataatgtaaaactgattgtacttgaccggttgattgtcttgaaggagcaccctgctcatgagcgtgttctgcaagatcttgtcatggacatcttgcgcgttttggccagccctgaccttgaagtacgcaaaaagacactgaatttgggtaagtttaaagcctgaggaacctatctatttgataagtagattttacttaattcaaattaagtcgtaaaaaaaatgagtttggagtattttcacgtccaagccctgcagcaaatgaaaaactgaatggcagaaagctttagcaaaggcctttgggcagggtcatgtagttttttaccttcaaacatttggcccataacattcaatctataaactgttgatctacatgactttgttcttacacgcaattacacctacatgctgcttgacctactagagcttttcccaacatgcaaattaaccctttagtaaaaaaaaaaaaattattggaaactcattcatatcattccaagtttttagccttgggtggtccaagtccagagatcaaactttcagagtaacttatagctttaagatatattttctccctttttgtaattgggcttcattttgcaatgagaaacttacaattctggctcattttagaaacaacatttaagccatatttttccttgtgtagataggtgcttttacaggtaagctagaagttgtagctccttattgcaaaatgaagtccaattatgttttactattgtgtgttttgcccatgtaaactgttaaattaagaagtaaattattatctagaaactgaaacaaatttggatgtaatgttaatttcagtaaatatgattgtctttcttgtttttatcagcaatggatttagtatcatcaagaaacattgaagagatggtgcttgtcttaaaaaaggaggttgccaaaacacataatgttattgaacatgaggacacgggaaaatatcgacagctacttgtgcggaccctccatacatgttgcataaaggtatgtgtagcttaatttttaacgtctggaactgtctttgtgttccaatttaaaacttctgtttcaaataatactacatttaaacgtttaaatacaaaaataatttaacaaactaacaaaactactgtatagaaaaaaatcatcaaaatcttaactattgaatacaggtcttctttaacccttaatagcatgaattaattttggatgtcaaattctaggggacactaatctatcttgtagcttgcataaaagatacggagtaccaatttgttttcaaaatttaaaatttgtaggaattagttattcaaaaaaagaatattaatgaaaattttcaaaatgatgctacagaggaaagttttaatctttaaaaacccccaaaaatacgttgttacgaaacgctatgccaaagagggttaacattatgatttttaattttatttgggcaatgtttttcttttttatcaattgtattactcattttttcacctctaaaatttggatattcaaattttagcttgtaattatcacttctattgtttttagttcccggatgttgctgcaacagtcattcctgtcttggtcgagttcctttctgacacaaatgaattagctgccacagatgttttagtttttattcgtgaggctattcataaatttgacaatctgagacccctcataattgaggtaagttaaataagttttatgtcagtgataaatttgttaaaaattttgaaaatattaagtagcaagtacgtggtttaacataacatccactttcaccgagtatcagcttacattgttctgctaaagaaagtagtgctttcatctctacttctgcaaaaaccaacagttctcaacttatggtttgcaagctgatgagtggtagtctgcaaaagctccccaatttttttttttagttaaaaaggggcaaccaaggtagagcgctcatatatgaaaaaaattgtcaacttggccttcagtacaaaatttggtatttttttgattccagcgtctccttgacacattttcaaccatcaagtccgaaagagttcaccgagcctcattatgggtccttggagagtacacgaacagcccagatgatattcaatcagtaatggctcaaatcaacaaggcattaggtgaagtaagtatctcttttcaaaaatgtttccccgcgaaatggtgtggacccagcaccatttctccaccttgtatctcttttcttcattattcgcattttcacctcctcagtattttctttttaaaaaaggtcccccctccattcacatagaatacccaaaaaatcttaaatggaagcatattatttatcatagctttgcttttcttaaacagtagaaaatgtgtttcaggttccaatcgtagaagatgaaactcgcagagcagcaggtgaaaaaggtgaagaagtcgaacattccaaaattactagcagtggcacctccacccctaaacttgtcacctctgatggcacttatgcaactcagtctgcttttaacacaacaacgtaagttttgcattgtatcttcatttacaatattatgctttaacatcaaaatatcgatcttgagctcacatgaaatgaatataaaaagtgcgtcaataaatttgaaaggtatcttaattgaatcatgaattaaatgtgcaaaactgtatatttcatctctatgtctaaactgtcgcatcagaaaaaccacaaacttaattcagagaaaagtgtcttatttccagtaaaatttgtattttaaatacagcatcaatatcttacctcattcaaataaatattttcaccttcaccaggtaagctgttaacttgcttcagctattgtcacacatctgtgcacaattttgcacctctggttgtatgcaaattaccttctatttggcagtcataagttttcatgttctatgtaaaaataaatattagtaatacagaataagtcctcagaagcactgtttcaatcacagttaattttttgtctgttatagaaatacaaaaaaagaagaacgcccaccacttcgccaatacttcatggatggaaactttttcatcggagcatctctcggaacaactctgaccaagctagcattgagatatattgagctggtacaagataaagtgaaacagaataaatttttgtcagaagctatgcttatcattgcttcaattttgcatcttggaaagtcgggtaggtttccaatcctttacttcaattaaactattagtagctaagccttgattatagatggtgttactgtactcagcaatttacaaacttactatttaatgcgcgacaggctggctatctggatacaaaattttgggtgtaactttttaaaattgatgaagcagattgggaagctgtgtctttcactaatcctgtactggtatggagaaagttaagaattggggaagacgcaaaccgcggtgaaaatgtgtacaaaatttgggttgtagtatttttccagcttcagaagaacatattaatgaaacattttagtagaataaatgcccaagagtacaaaatgcactcatatttggtgggttcagtaacctaaagatcttatctttctgtaaagttatgtaactgtcaattggaccgcgtttaacagaaaggaaccaagccacatcagctatttttgaaattggaaaaaattcactgaaatttacacagctgttttcatgtaaaaaattaaatcgcccgattaaatttggcgatagttgacgtggcttggttcctttctgtttaatgcagtccaatcgtcattctatttatggattgaaacattgaattaaatcattctccatcatttcgtaggcttgaccaccaaagcgattactaatgatgatgctgacaggctcttggtgagtctccgagtgctgtcagaaaaagccccacctatcgttggaatttacaccaaaaactgccggcaagccttagcatccatgcttgtcgccaaagcagaggaagaagcttcatcgcaaaaggtatgatacaattctaacaaatcttaacctctaataagtatttcaatgtatcaagagccttcgcaggcttaggcacgtctctttctctctgtctttaacactaagtgggactcgcaaacttgacaactacctttcagctaccacttcataacagtgagtaatatctccatcactttctgcaatgatgatagaaccgaaagtatccatgcagtaccaagatagattttctagtaaaaagaagttggaaaacaaagaggctactaaatgaaccaagcctgatagggagtagattcttgagttcagataccatttcatgtcgtgaagattctcacaagatctctaaaatgtgtttttaaaaaactgctatttttcgtcattactttcaaggagagatgagatttattgcaaaagttatgtattggaaaactgatgagtaatagtgacaatcacagtaggcagtggtttcccttccccaggcaccatgtgccaaatacacctaaaaatcaaactttggtgcccaaaatcgggggagggggaggctgggccatcaagacgtcaaaaaaggtgacgcattctgttgattttttctaatggctattcagagcagcagtaaggctctcaacacacttgctttcttgcagcaaggcggcgcaggcagagaacgagagcgtttgctaacgggatgtagacctagatcaaaacagtgcagcttatgccaaaagtttattaggctcctaaaaatcgagcttttcaactaaagaggctcccaaaagcttagggcgaaggcagtacactaacagtaggtcacttatccaattccacttgtttgcagcaaactagggaaattctatgaattttccaaaagcccatgagacgtttttactttaatttctgtaaaattaactctgacttctttgttcattcatttgacaaggccaaagagaaaccaggaaaccaagtccaaaccgatgaccccatcaactttatgcaattgtctaccacacgcggtggggaatttggagccactgaaaatgtttttgagttgagcctaacgcaagctgtagctggcaaccttagtgggtcttcgcaagatacacattcgcctctatctgcaagcaaactcaataaggtgacccagctgacaggattctcagaccctgtgtactcggaagcttatgttcacgtcaatcaatatgatattgttttggacgtcttgatcgtcaatcagacctgtaagtggtattgtagattacattcaaatcctgattttctcttttgcattcatgaatcattaatgtatttactgcaccgcagttcaattctgtgttgttagttggactacaacaatggcaagtgacaggcaagttgccttcagtagaaggcaatccatctgctgttagtgtgaataacttattgcaccaaaatattgctctcacttacaatgtttaggtcacattctagttttttctagttctttttccaactgacattttttgatcggactcataaacatacttaaaatgattgggtgctctgcagcaattcgcctgccaatcggaactctcttggttccataacttaccttcaaccactctcaaggaaggaaagtttgtgtcctgattgatttagattcgacctagctcattgaaggatactcgaaatcctgaactgattcttgcaacgctttttgctttcaatgcaaaaattgggaatgcggtccaattgcaggcttaacagaacgtcagacaaactgttgagtttttcaataagtttagaacctgaaaatcgtgattatcacctctgcttgttacatttggcttatctcttctcgctataatttaatatatacttgttttctgtaattgcagcggatactctacagaactgtaccttagagcttgcaactttgggcgacttgaagttggttgagaaaccacagcctgtagtcttggcccctcatgatttttgcaatatcaaggcaaatgtgaaagtagcctccactgaaaatggcattatttttggaaatataggtatgtaaatatttacagccaaatgcttttaaatctaaaaatgtcgaaaaaataatagataacaaaacaggaatacactatgtcctatggcagcaaggtatggcagttgaagaaacagtcccaggataatcttaaggcaaccaagatggacttctggcataaatcggccgtagtgtcaaggatcttgttcagaatgaaaagtttacgtgaaattatgggcgtcgaaaacaacgcagtgcatgatattttcacgaaacaactcgtctggtatgggcatgtgcaaaggatgccagatgacgggttgcctacaaaggttctgtattgggtcccccgtggcagaaaacgtagaggacgccttgccaaatcttggattcatggaataaggcaggaaatgaggagatgctatttgctagaggagctctggcaggatcgctatcagtgaaggttgggtgtcgcagagctcttgaatgcactgtaagtaagagcggcatgttagtaatagtagttaatgcattccaaagcaaagtcataattttttgtcaaggctcatgagtgcttcatgaggaactaggagaagaatttgttttgtttccaaaaaaatatgaagggatagctgtaaattagaaaattgaaagaaatcttgacaataatttgtatatttataattgttgatttttaagtgagttatcattatcgttttttctgtcttttttgacgtcttgcttttttttcagtatatgatgtcagcggtgcctcctcagatagaaacgtggttgtgctgaacgatattcacatagatatcatggactacattgttccagcctcctgtaatgatatcgagttccgagtgatgtgggcagaatttgagtgggagaataaagtaagtcaaaattaattggattcatgctaaccaggaaccgaatacttaaaagtgaaagtcatgtagagtcttgttaaagaataatgtcagctgctggtgattaatagaattcatatttttgggccaacgaaaaatgccagcatttaacacgagaatataaaactatgtactaataccctaatttttatgcaagtttcaatcgtccaactcaatcacagttctccagctcaagttcgaatagtaaagtgattttggattcccatccagaaatgagttggaagtaaatttgaagagtgtctgttgtcagttgctaataatcatgcaattattttttgtcaaagagcacctctgtcatcatcatgttaaaagattagaagacttttgggtgctttaaatggaaattataaggaggaaagcttttttcaaattcatttagaaggaatgggcctgttgcaaacttttgctagagcaaaaataagagttgtctcttatagataatgcctcaaaaatcacgatgagcgcatcggcaaagtctgaaatgcactcataacttcacaatctgcgtaagaaatttgcgtttttttaagcttcccgcttcaaaaacgatactacggcacaagtgaacattttgttagaggagtcgctccatcgtcggcgatattcatcatggccgacgcttgcgcgcagttccgcgcgtaattcgaggagagttcaaggtcaatcaatttgggcgtggataacatgaacgttaaaacacgccgattgttatctggtctaatccagttcaggtattatctcgtcccatcacacgtgttttggcggattggcgtcggccatgatgagtattgccgatgatggaacgactccttttacaaaatgttcacctgtgccgtagtatcgcttttgaagcgggaagctcaaaaaaccgcaaatttcttacgcagactgtgaagttatgagtgcatttcagactttgccgatgcgctcatcgtgatttttgaggcattatctagaagaaacaactcttatttttgctctagcaaaagtttgcaacaggcccattgttaaaactgctaatgccccttaaggtttcttggcgcaggaaaagaaccagctcctttgttggttaattttttcagtcttccgtagctaaatatatttctaatttgatttttctcctccttttgtttgatttaagatctaattctttgatgtatttttgcacaaaaatctctcaagatattctctaaaaatttattgttaaagtctcatctatcatttgctgtagcgcagattatttgttctgtagacattcatcttcgttaaacttcaaactaatagaacaaatcaaagttgccagtgttctcaactaactgcttttcattaagtatggagcagataagattgctatcggtctcagaaagatacacataaaccttaagtaaaacatgaacacaatattattttgggcacttatcttggaggtacttctggttataagaaattgtcaagtcaggaaaatgatttgagtggaattgagtttttttaggagcataaaacgagtaggagaaatctgtaaacctccaagaaaatttttggaaaagtcatctgtcaattgctcacttgttaattaattctagaaggctgttttcataatttttctttggatctactgtcgctaaaatatttaatttattttacatttttcttcagctctcagtcaatactaacctgacagatctgcacgagtatttgcaccaccttataaagagcactaatatgaaatgcctaaccccggagaaagcattgtcagggcagtgcggtttcatggcagccaacatgtatgcccgctcgatcttcggagaagacgccctagcaaatctcagcatagagaaacccttcaacaaaccagatgcacctgtcactggtcacattcgaatccgtgcaaaaagtcaggtaaatttattgcaatgctgtttcagtatgttaagaggcgtctaatacaagaccaatttttggttgtacatacttcatttattaaccttttaaatccctaacatgaaaattcacgttttttactaaactgctgcttgtccagcatatggatgaaaattttcgacccgcaaccttccaccatatgtttttgctcctgcgagtacatgtttgatctagtaatacaaatgcattttaccatctgcaagcatctttcaagcgcactacttttgggcaaggaagctgttaagcgcactgttttatgtagaagcgcaattgtagcaaaacagcaaattatacattgggaaaggctaagaactttctgcacccctggcataaagagtttttaatacatactgtagctcctttttagactgatctcttaactggtacagcgaaacaaatgtttttgaacaggttctggtaccaacatgttttgtctatttcttcctgtggtacctgtaaaacatgcaaaaaaaccaaactttggtgatcgattaaaagattccgaagctaggttcaaaacaatttttagacctttgcatgctgtcatggtcaatttgctatcagcgagcaggtgtcagttcactgtcagttaaggcttgtcgctctcatgagcctgacatgtcatcacaagaccacctaggtgtctagcccatgaatctgactttgcatagacaaagttaaagaatatttgtattttgttgcacaaactttctaattgacaatctcagtaaccactaaaaattattttcatatcgtttctgtttgattttttcagggtatggccttaagtcttggtgataagatcaacgcaacacagaaaagacctgtcaaagcttgttaaccctcata

SEQ ID NO: 4 - DNA, 15549 bp, Bemisia tabaci
  source 1..15549: mol_type = genomic DNA
ggtggatcttctaccacatacggtgcctcttaagatctagtttagtgcatacgatgtgagagctcgttaatcctgagctatgcaaactacttaatcatccttctatgaagtgtcgtttttttcagtaatggtgaaaacattttttagtgctattttttacagccgtaactatccttgtagatgaccaacacctggaatatgcagttcctgtgaaataaattgttggaggaggggtcctactttcagtaaatctttgagtgtactactaccaccacatcattgtaatttttagtgagacgcaactatgtacaaaatcgcttttatatcagtcatttttagcttagtatttaactattatcatgctttgaacgtagatcacaagcagctcgattggtggcaacgagctgtattctatcaaatctatccgagatcgttcaaagacagcgatggtgacggaattggagatttaaaaggtacgtaattcaaaactaattttcaccaagttttattttccttttttcaatgttgtgagatatttactcaatattaaattcaatggtcattttacctttctcttaaaaatgtcaagttaaatagttagatttgttccattttgagtagtgcttgaatatttgttacggactagagacatttaaatttttagaaattcttaaaaattcatccgtttttaaagctcgcgctgaaatgcatctttatggttgtgataaaggatgaacattattaatgaaaaagatcagggaagaggagcgggggctggaatgattgaatgttgcggtgaccctcaggaaccaattggtgatacctatttacgagatctgtgctcttatattgagtgtttattttcaatatttcaggcatagctgagaaaatttggtatttgaaagatctgggcataacaggagtttggttcaacccagtcctagagtcacctggtctggatcttgggtacgatatttcaaacttcacgaacttagatcctctttttgggacgatggaggattttcagtacttgagagaagccctatacaaagcaggtgtgtattttttgcacaatttttaagtagacagaggatagagtatattaaatacaaaccaatccgcatttagaaaaaaaacgaggactaattggtcgtttgttttctctgaccaaaatgtaactccatgaaaaaatatctactcagttccacaagtaagggttcaaaatgtttcactttcagtctttcagaggtgtgaaatttcaaactgttgcctattcccactcaatgtgggtgactcgtctctgctgagctgacagaaatcatgattattacgattaacattgtcagcaacaccgcgtgaatccatgatgcatacagagcagagaaaatactatgtggatatatcctatgtactcgtcaactcaaagaaacattttccgaataattaagtcgcaaaacagttgagagataaacaatcatgtaatttgatacatttcttaattttttaagaacacatgttaccttcttagaaaaactgaccgaagaaaaacaatgactttgactgttttttggtattgtaaaatacatcacattgagaaatttcagcaaaacttaaaacatggtgaaaatttgacttgtgcattatgaaaacttcaatatttggcaagaaaaaatgtataaatacgacggaaagaacataatatgctttcgaacccactaatccccgtatttggacgaacatacaagtacgcgtattttatccccgacctttgattgactgtgattgtaaatagaggaaagaaaaagaaatatgcatactccttttgaggataaaggacgcagttgtgtatttccttcagaaaatacaccaaaaagtatttaatcgaccatacatatcgtataatttttgtatactatcaatgaattgcaatcattgtgtattcaggaattcacctctttctggatatcgttccaaaccacacgagtgaccagcatgactggttcttgaagtctgtgaaaaaaatagacccttatactaactactacatctggaaggacccaaaaatagtcaatggccagagacaaccgccaactaattgggtgagctgaaatttaattactacttatcccacaaaattactatctctgaaaatctatccagcttggaaatgaggaatatgttataataaaagttgaagtattgaatgaaattttaaatgtaaacagaggttacaataggttgccagttgtagcgatcaaaatgcctccccaaagattagttcgtctgtatccaaatttcttctaagcaataagtgcctaacagcgacacgaaatttaaatcaaaattacataatggaaaaaaaataagaatagcttagtattataactaaatgttagaaaaaccctttacaataattaaggcaaaagttgaaaaatctaataatgctatattctccagctgccctttatgcgatttttaggataatatcattagacagcaggacatatttgagaaaactaaactttcattttctttttagctcatttgataggtagcaatcatggtggcaatcgctggctgtaaattctaaaattaaaacttcaaattctatcatgattttagagacaccaatttagattttatttcataaaatatattcatagccataatttgcatcattaattgcattaattgtggtatgttcagtacttttagggtaggtctaacgaattgtaccaactctatccgttctgttccacgcaaataaaattaaattaaattatttttttgttttaattcttaaaattgaaattatggaaaatttgcattctttttttgaaagcagtaagaacgtcatgattaaagtttaattttcaaattttgatagctcagtgagtttggaggctctacatggaaatggcatgaggagagaaatcaatactacttgcatcagttccattggaaacaaccagacttaaattacgattgcgaagagttggttcaagagatgatggtaaggctattttctttacttcgtagtttcaaagatttgttaatttgatgtcaaatacatgatattcattaaaaataaattccacaagtccaaacaaatggaacaaaaaaaataaaagaaaatattttgcagatacctaagtcgctccttaaagtctctcacgatatacgcctttttggggatttgtagttatttcgtgtattttcgtgttttaagaaaaaaaactcccgtttaaaatgtgacgaaattcaggggatatatgtgcgcagttttgctacctctttatttataagttttcctttaatttcgtggctttgacgaaaaaggattcaaagtaagaaaatcgcaaaaataacttaatttttttagagaaaaagaaaagaaaaagacgcaatggtagaattgagctctgaagaacacctgcagtaacaatgatgtctgatataagaatgactcaaaatcattgcgcgtccaataacagactatcagttgcgagtgaaaaatagggtaccagtacggtttaaaattaaacttaaagtctcgattcttcttttttctgttcatcatcatctctctttttagaccataaaataacagcgtgtaccaaaaaaaaaaaaaaaaaaaaaaaaaaaaaaaaaaaaaaaaaaaaaaaaaaaactgggaaactttgttaatgtgcgtactaactgttgaactaaaaactctggctacatttgctgaatcaatgataaccgagttcttcctgaaataatatgtcttagaaacttcatgaaatcatacattgagatacagtcgaacctcgataactcgaagctaagggaaagcgatgaaatattcccgaaaaatgcggataggctgatccaggataggacattgttctaagcctggattctaagccaagtctaagccttcatctttggtgtcatataaaggtaattcgcggagttcttcgagttaatgaggtaacttcatgagatgtggaggcatgccgcgagctatagaggcaatgggcctgttgcaaacttttgctagagcaaaaataagagttgtttcttgtagataatgcctcaaaaatcacgatgggcgcatcggcaaagtctgaaatgcactcataacttcacaatctgcgtaagaaatttgcgtttttttaagcttcccgctttaaaaacgatactacggcacaggtgaacactttgttagaggagtcgctccatcgtcggcgatattcatcatggccgacgcttgcgcacagttccgcgcgtaattcgaggagagttcaatgtcaatcaattcgggcgtggaaaatatgaacgttaacacaccgattgttatctggtctaatccagttcaggtgttatctccgtcccatcaaacgtgttttggcggattggcgtcggccatgatgagtattgccgacgatggaacgactcctcttacaaaatgttcacctgtgccgtagtatcgtttttgaagcgggaagctcgaaaaaccgcaaatttcttacgcagactgtgaagttatgagtgcattccagactttgccaatgcgctcatcgtgatttttgaggcattatctataagaaacaactcttagttttgctctagcaaaagtttgcaacaggcccattcaccggttttttcagttcatgtggtgaaatgagcccaaaatggacagagtttaacagaaaggaaccaagccacatctgctattgccaaatttaactgtgcaatttaattttttacgagagatcgttcgtgcggattcctttgaaatttttaaggaattttcttcaaattatggagaattttccctgaaatttgcacgaaaatccgcacaaccgctttcgcgaaaaaaattaacttgcccaattaaatttggcaatagctgatgtggtttggttcctttctgtttaacgcggtccaaatatcttcgacttaacggaacaatttttttgaattatcgagattttttgcctttggcggaagggaataaccacgttattttattaagttattgaaattctcgagttatcgaggttcgactgtgtgtttcctcctcctcgtgcgatcgaaacatacttcgccttgttttactcaggagatatatttcatgacacaaagttctattgagtgcaagtttcgtcttcgtttcaattcgacaggacgtggtgaggttctggttggagcgcggagtggacggcatgaggttcgacgcggtggcctacttgttcgaagatcccgaatggcgagaccaagaattgctctcgcccgatctcgacccgacgaactactggaattacaaccggtcgcggacgatggaccaaccgaatacatatagattgataacaaggttcagggaggtcttcgatttctacacgaagaaagaggggaaaacaaagtaagtaaaagcaaacttctcgataaagtagcacttgagaaagatgcatgagtcgatggagtttcgcggagtcagattgcataacacggaaaaaggagaatggttccttttttttaaaaaaagctcatgatggatttcagctcctaccttcttcctacttaaagttacaatgttactgtgaacgtaacatcgtaattacgattttgaacgtgggtgggacctgtgatcgacaaaaagcatcgtatatccaacgaatctgttttctccgtatagagggaacagaaggatgaatgcatcagagaaaattgaactttatgttcaggaaagagaattttatatagattactaaaggataatgagatttatcttaatgggaaacattggcggattcagcaaattagcaatattgtctttcctccattcaaacctatggatatgtaccgattcttggaggggccaggtgctccgacaagaatcgattgtttaaatggagaaaatcctgtgttgctaaattgctggattcacctctaatggtaaatcttacgttacgtaatacttcagggccggttcaatgaaattacttacttacttactactggcgctacagcccggggtgggctttggcctccaagacaacgcgcctccatcctgttctgtccatggtcttttccttccatccatgaaattagccatcgcaaaagtgtatctcctgatttcaagttatacgttcgcagtttttacatgatgcagaataactagaacaagttttagtaatcactgattcatgtagcttttaaaaatctcgatattttttttaaaaacttgtctctaatagacgttaatttactacgggcatcttatcgaaggcttatttacaaaccgtctggttatagaaacaaaatattttccgactggaacgtctcaatctccctatttcaattgataaatacacgatgattggagaagaagtttaagggaaaatgttcttttttttttaatttaagaaaaaaaaattgagatctggttgttcatagatttagtatcaactttttactattttgaggatacggtagaaaatctaaaaaatgtttctccaaatgaaatgtatttgatcagagtactctctggttttgcagagtactaatgacagaagcatatacaactctcgatagaacaatggactattatcagtttgaggggaaaccaggagcccatatgccattcaatttctttttcatcacgcacgtgagcggtcgctctcccgccaaagattaccaaaaggcaatccagggttggatggacagtatgcccgcaggcttttggccgaattgggtggtgagttggtaatttttttcatttgtcattggtcattgaactcggaaaaaacatgccgtaactatccattccagtggcgtggcgtgaattgcgatttatcgataattcgattgttatgccatttgaacctatggtaaagaatcgattattaaggtgttcgcagcgaacaccctgtttatcgatccttttccataggtttaaatggcatgacaatcgatacatcgcaaagcacgccacgccactgaattccgttttttcagattaatgcgaattcttcgtatgattataataatttcagcgtctcttttgatggcaagctgatacgtcgtaagaaaatttgacataatcacatggttcgatgatacttaaaaggggaagattggagagcagaaattcagaatttgttctttttttcagacaagttacttaagtaaaatgaaatgaataacattcaatgtcaagttttacaagttgttatgcctctatattcaagatttgaatcgtgaaacgtaatttattcgtgaaccatgttttccattacaccatatgttttttggggcatttttggaaatagaaatacgcccttgcgtcatggaggcgacaaagaatcgactccttcaatattcgtacttaatcctgggacaccctatatttttagtttgagaatctcgtatatcaattggattgcattttgcaaaaaggaaccactagaattgcaatgttgctaagattgtgcaacttcttttgtcttggaggaaaaacccgattatccattaattaatagtttctattttactcgctaaaaactgtaaatttaagacaaaaattaccatcgaaatttcacagtctttcacgatttccgaaattttattgcaaaagatgaagttgcacaatcttagcatcattgcaatgctagtggttcctttttgcaaaatgcaatccaattgtgaatcactcttgtgttcacttgtaatagatgggtaaccacgataaccgacgggtggcggcgcggtatggatcggatctagtggacggcgtgaacatgatcgggctttgcttgcccggtataggcaacacgtactacggcgacgagatcggcatggacgatacggtaatccgattcgatcagggtgtggatccgcaggcctgtcatggcggcccggagtggtacagccagaaatcgcgtgacccggccaggactcccttccagtgggacacttccttgaattcaggtttgctaaattaatctaccaagaaatttgagagataagaatatagaattgaggggtttggagtacacggcgcttaagagcattttttggaaaaattgaggtattaatgatttcaagcaaaattagttttaatgtatattctgtgaaaacttcgctctcaaattccaatttttaagcatcaaaaagtcagtttgaacattctttctgccgtaaggatccacgtggtctcgaaacttcaaacacgcgcgtatttctcgaaatagcaaaaactgcaattaggagctttgtcctccaagcccttcaatcgcaggtgtcttttttctttcttttttaaagtttttttttttttaaaaaaaaaaaaaaaaaaaaaaaaaaattctacagttgacggcggccatttttagtttcgagtgaagttgtgaaattaggatgactcgaaagtatcaaactgcgtcttggccttagtatattccttgaagcaaaaagataaaaaaatgcgcacattttttacagagattgtcaagttaggcttaggagtggatttagattttttcaattaactcatcgtggtcattcagacatcttccataatgagcgactaatctttgttctccagcaaaaattagcaacagacctcctgtgcgagccaagatggtaggttcagggttcattgtaatttgggataatccacagaacaaaaattatttcagtgaatgacattattcatcgggtgggtgtgcaattgtgcattgctgctatttattcataagacgttggtttctcatacattctgtgaattttcataggttttacgacgaacagaaaaacttggctcccagtcaattcgaatttctggcgtttgaatctgaaggcgcagatgcaagcaggtgaaaacagccactggaaagtctataaaagactgatgagcgttcgcaaaacagacaccatactttacggtgatttggaaacattcgtcctcacgaagtatgtcttcgctttcgttaggtaggtcatgccggacgaataccaggcagtggcgtggcgtgaattgcgatgtatcgattgttctgtcatttaaacctatggtaaagaatcgattattaaggtgttcgctgcgaacacccagcctatcgatccttttccataggtttaaatggcataacaatcgatacatcgcaaagcacgccacgccactgataccagggttggatcgtgctttttagagaattttcggaactttgaaggtaggagatagggtattggcccgtcgtttgagtgtcaggcacacgttcaatttggtttttctcgagccacttttcgtaattcatgtgcaaacattacacctttctgagccagtaaaggcatgtgaattgtatggccctttgatttatttgtgcctctttatttaacaagaaccagcgtatacacaagcgatcttataaattatcttatgatctcctatttttgcataggcgcttggaaggaagtgaagcttacgttgtggtggttaatctgggaagtgactcacaatcaattgatcttttggcatttatgagtgatctaccagatgttctaacggttcacaccagcagcgtcaacagccagtatttaccgaagtaagttatttattttcaaaccatcatatgagcttccgcgaggtaactttcaaagactgcaaatgcagacaaaatgcaatcgattaacgaattcatattccgcatactattttactcacaaccatttcataagtatttgcacgaatataacacgaataggaatacttaaagttcgattagtacatgattataaaacgagattgtttaagttttttctcttgggtttccaccaccgtttgcaatgaagtaggagtaacattgttttgagagaaaattatacctatacacattccaaaagaaacatattaaaagagagaaagccaaattataggtctctattttaatagataaaaattattggatttccaaatacttgtatagaacaaaaacacattctttttccactcacaaaacacagccggacaagcacaacgcttattgattattattcatatttccaaagtatataatacggaaactcctcaattttatcattcaacaattttttattacattttacctttttcaagaaaaattaatcaaaatctcaccatgcaattttgtatgttttttccaaaaaccagaaaatggcaatgtacagaaaatttaaaaaaaaagaatcatggtcagtttttcgttgcaagaaataaaacatgagtggagacgtacaatgtatcgcaatcggagacacatatatttggacgttaaggcatcgacacatatgtacgatgatgtttgctcgcgacatctgcagcttcattttaaattttcattttattttcagcgataaggtatcaacgaatggatttttcctgcgcccaaaagcctctgttcttttaacaacggccaaagaggtaccacctcctgcttacaccgaccctgcaaatggaagttctacaatccacactgtgtatttcagttttattattacacttttcatctacgtatttttctcctaggactctcgtaataatgtgaaattcatagatttcatatacacctttctccaaatctttctcgtttcattgaaatatccgcacctttaatttcggcaaagacagtgatgtatataatttagtgaatcaatgatttgtatgtacattcgattcctacattaatactttttgcagctgagaaagaaaaagtgttagtctgaatgcagattcatgatttacgattaataattaataagtacctattagactcgattttgcgttcgtagattgctctttttttaagagtaattctttaaaacgtgaaagaaaacttctatatttcatacttgtagggcaaaatagtgacgggaggtttactttcgtccactttattgttattagtagcgtgcgcctaagcattctcttttgcactctctatttgcttcgaatgagctatctgtaaacctgaaccacaaaccgtgtttatcgtgagcgccttcaattagcttttgatacactttcaccgacgcagaggttaaaatagttgcttcccagcgccttaaactatggaacagttaagaggcatgctccatgaccgtgtattattcagtcacggaatcttgagaatatccgaaagctatattaagaagtgcgaatcataaaaaagagtgaacatgcacgtggacaaccaaatcaataaagttaagttgattttatgtaaaaatcagaaaccttgaaaaatcggcaactcgacttagctcggtaatcaaatccatgcaggtcggttttccgtgggacttgggtcgagaaacaaagaaaaaagtaggacaagagatgccgagaaaaatgagtaatgaatttcaaaccgggaagcaactccgccccgtaatttgcataatcaaaggcggaaagtgatgcgccgttaaatgaaacgtgatcaatcattggaaacacggaaaacttaaaaccaataatcggcaaagcaattcttggcccttaaaggaagttatgcgactccgcgccaaaaattaagcacaactcgtgcatataggtagtttttacgacacgtatatgattcaggaatcaaatttgattttcaaattatttattctaattatttttactacatatatttagaatccctcaaaaacagatgggttttccagagaggctctttgcagacaggcccaaaccgagtccgtaaagagtggagactaaatnggggggggggggggggggttacactattttaaattattaaaaattattaattattaactatcaaaaattatttacactattattataaagttaggtaattatacaatttaaaatttagaggaaaaaattgataattattatctgactggtatttctaactggattctaacaaggtatagactcacaattcgtcgccctcctgaaataaaggcgtaactgcatttcgcaatgagcctagtggcgtggcgtgctttgcgacatatcgattgatacgccacttaagcctatgaaaaaagatcgattattagagtgttcgcagcgaacaccttagtaatcgattctttaccataactccaaatggcgagatatcgataatcgatcattcacgccacgccactggatgagcctcatatcgtccatttaactcaatgatttctcgggctcatctcaatgtgtagtttcgcccctttgtcagccaagcgacgaattgttgcactaagttacccctaagtgtatctttacgttccaagttacggtccgtaatgttgaacgaaacctacgtttttagcattccgtaattcaaagatgatgataacattcctattttcagagtcgatatgatacgcttcaatcgcctcttccacacctcttgagaccaaaaaggtacctaaggtacctgaaggtagacgaggcacgtccttgccatctgtggaacgttacagaactcaggggtagttcccaagcgaaacattcaggtggtagtattgacaacagctttctgcacgagatgctgaaagcctttgtttcccagctgcacgtcatttcttggagggaggcccggtgttcccgtaggttatggagtaaagcaaacttatatcgcgcgaaaaaggccggaaatgcgtttcctcctgtttacggccggggcttttagcattttaattaagtaagcgacgcgggttccggcgaatcccgacggaaacttgggccgttaactagtttcctcctgaaatctgcagagttaattctcccaagttgccgcatctctgagcttcttgagacggagcagactctcaagtcccgtcggcaacaaatatcacactgtgggaaacagtcctgtatcatgaattgtaataggtcagtttcgctagagtgcctgtatacgggagagcattgccatctccgtgccgcactctgattggttcattagtttcaggctatcatggagctccaaagttggaccgatgtaaacaaacccgacccagaggagcacgcattattggctgagaaatgaatgataatcacactcaaatcctaatttttggaaaatatattcatcagagttcgatccgaactcaatacagaagttggatgtaaaaaaaattccatcacacccaaaatcacgtctagaactttgcagaacttttccgccatcttgtttgtttacattgggctgaactaggagcggaggggctagggttttttcacatgtgactacgtcattcaatgcgcatctctgttcgatggttttaatgtaaacagacgtgagaataaccttgtcttattcacggctgagtgagatgttaattttttttttttttttttttttttttttttttttaaacagaatcttccgatgtcgtgagagatgacgtagccaataaatcagctcatgagattaaaaccgatactcgaattgtaacgaattacagtcaacggaccgttgcagttaggcaacctgcaacgcagcctagagagacacggtttcagagcgatgcaaccgcgtagcggttgaacgtgtttttcatcagataacgctcctctcttgtgagtctgcccaccccctacccctgcctggctccgaagtgactgtgatagaggtattcgcttactactcgccgttcttcgaccttccaaagggtgcttcttccgagaaaacaaaacagacgagataagataacaaggtcactgggtcgtagtaaactttcggatgtgacctaaaaatatgacaggccaaaattaactttctttaattaaacaagcaatgcggtcgctgcgctcctgatatttctgcggcttcttcctgcctttgttaaaatataaaattataagcgcggaaatacgggaatcaaggacttttcataactttacagctgggagccgtaagtgatgtaaatatagtgttcacctaatatgagccaagtgaatgggtacatttcttaaagtaggtatctgagcatggaaaccaaattaatatgccttgtttcttaaacacgcaaataaaaggtaggtaataaacttgccccaacttgacgcagcaaaaaatcattttaaatgtgacagtaaaaaagcggcgcaaactttttttacgatcaccgttacgataatttagaaataaatcgctttaatttatgtataagaatagctgagtgccttcatttttcctacatgctacacagagatcaacgcgcggaggttgcataaagccgtcacttagtaaacattgcgtagcgttcatgggtgaaaatacgcctctgattgtcaggaaataaaatgatagtttcctgaaaggaacgttcattttcaagctgattttcaagatatgatttttacttgcttgtttcatttaagtagtctaggctggtaaaaaacacgttatctaggtgaaattcaacgtgaccagtaaggaactgccacaggaaaacgcgtttcaacgacacaatagcaatgaaatcgtaattccacgcgggacgaaaaggaagtggtcgaaacaaactgttagcttgtaaggatataaaaaccgtctaagtagttgcctatatccggttacagggtggggcaaaggctacccctcaaccgaaaatattcgtctgcaaactttcgtcgcaaacatattatcacacgcaaaatcgtcggtgggcgagattgccgttccggagataatattcatctactttgtattgcctcccgtggaaatgacgggtgaaatcccgcagaaacggcaacgctgccataaagcttgtaatccgtcggcggcgacataaaactcaaaaactaaacaaataaaggcacacgcagcgtttggaatgaggagcgcataaaaatcccggagtaacgccacaaagacggggaggggattaattttaaaaactttgggcacaactaaagtatttgcatttggaagcgccgggcaaatttattcatgtattcggccacaaatctcgttaagttttacgacccgcgccgccggtggatgacgtataggtgggtgccattgccgttttgaacgaggggcgggtttaataaatagggacgatgcaacgttttctaagataggtgattaagagagacagttaaatgcagcgttacgtacgaagggtagtaataatgacatcggaagctcatcttggcgcgtaaattttgtcaattaggtttgggctagagttgtttcatctaagtcaatatttcttaaaataaagacgcacacccatcaaaatttggcacatttactagtgtgaggtcatttggattacattttgcgatgaggaaccactatttctagctcatttttgaaacaacataagtgccataggcttccgtatgtagatatgcgtttttaaggaagagttaaagatagtggttccttattgcaaaatgtaatccatttatcccgactatatattcagaagttttttgctgctgcatcgctttcacgcgctgtatacagcgcgataaaagcacatctctatagagatttgcaacgtaatcaaatattctttttactttttgttatttagatttag

SEQ ID NO: 5 - DNA, 7346 bp, Bemisia tabaci
  source 1..7346: mol_type = genomic DNA
atctctgtcctttatcagacttgactgtcgtgttttgtctttggattttggagttttggttttggttaggtgcggagtgcaattctaacttctttagagtgactcatggtgtaatttatcgagtatttctttattcatttctaaattgaattacttttaagtgctagaaataacattaagtcaatatgagtttcctagcaaaagtgttcggtggtaaaaaggaggataaagctccctcaacaggggaagctattcaaaagttgagggaaactgaggaaatgttagtgaagaaacaggaatttttagagaaaaggattgaaaaagaaattcagactgccaaagctaatggatccaaaaacaaaagaggtaagtatccgctttggtctcttccttgaatgaccgcattgctatcattacgatcaagaatccttgagtacatgtcatctgttgataagtcatccagcttcatcatcatcctgaactttcattgtctttgatctctttatcttgttaagggtcaaaatgcataatctctgataaaattagcaagacttactcgctttatttcttgccaccgtcattgagctgcatgaagctcctgtgagattggagacgtcagcctaaacaggaactattttcatcaaccttaaaattgatgaatgactaatccatcttaggttgaaacctaacaatattatttagtatctatttctttgccaacttattaattgacaccctaagtcctaacttcgtccaagattaacggagagatcacaaatctagtttcggtatacctatgcttatcggcatcgtaaattaaactcctgtttgtgccaatgattgatgcgcaagcagtaatactggcaagctcatgttagtatatactgtctaagttttgtttccaaataattgaacagctccctgatagtggtgtgttatcttgatggagattttcaatcattttataaaaaaaaagtctatcacacaacctctctgatagtcacatccagctgctatgtcattcatgcaatttttataacatagccttatgtcaaaatttggttttgatagcgtatcattgattatggtgcttgactaatcctacattaatgaatcatgaatcaatgtgtgactcatcagatttgagatgttacacggcaaaaaacaactcaacatattcaaccacggtggcatgagtatgattaggttatgtttctgtttgaatttaaaccaccaaacagaaattttgatcaaattacgttgccactaaatcttgtctgttattgtaattgcttgaaataacaaatgaaatgaagttgtcaacctattcgtaaaaagctgtaaacttgcttagaaagaagattttctgttttaaatttattacgtacggattaggaagattctctgcttggatttgaaattgaaacatgatcaattgacttctggaaagagaaatctcatcatgtcatcatgtctctttgacttacagcttcacatcaactgaagtagaaataaatttttgaaaggtttgaagatggtgaaaagttacgtattctagaacattaagaggatgagcagtaaaaaggatgacctttttcagttgataattgcaatgcttttaccaacttcatttttatacgcagaaaatctggaacaattgttgctgcgctaagaacctcctgtaaatttatctgtagaggaaaccggaaaaaaaactgaaagagtttccacacagagcatacttaactggatcagttttcgtttgcagtacttatccttcatttttttttccacagctgctattcaggcgttgaagaggaagaagcggcttgagaaacagttacaacagatcgatggcacactgtctacaattgaaatgcaaagagaagcactggaaggtgccaataccaacacagctgtattaactaccatgaaaaatgctgcagatgcgctcaaagccgctcacaaacacatgtacgatcctatcaattttgaatctcccataggtttacttctttttatttttttgtttgctgtaactttaagttacaaaataatgattcagggagttgtagcttcccacctgacaaagaatccctatttcaagtagctgcctgcaagagtcagggcttgtgatgctttgaaaagtccttgatcatagcagaattgccgggggtctggaaaaccaggaaattcagggaaagtaggtaatttgcagcgacagggaaaagtcagggaatttctaacacagctactaatcaccaaaacataccacagatcttccaactgttcaccttttgtggtcttatgaaggcatgtcatcttttaaccagctactgaatgcttgtttccataactggatcttccaacaaggaaattatgtccaaaagcgaaagtcagtgtaggtatttaaaaaaaaccatgtggaaattttgttagaaggtcagggaatttgaaaattttatacctaagacactcacttacttttgcattagcaggggtagtttacagaccgaaaaaccatacatcgatggtgaaactaccagaccacgtatctcgttttaggtgtttaaaaatctccactcacattttatttttttgaaggagatcaaatcaatatcattccttacaattttcacagatttttctccgcacaaagaggaaaaattacggaagttttcatgaattgacgttgagtagttttctatttaaaaaataaagtatgacaggaagtctgcgacgtcgcaaaccgagatacgtgcttcggtagtttcaccgtcgacatcttgtatgtacatggttatttgaaaaaattgaagcactatcacaatgcggggaatggtaatatttatttttttcttttaaataaagtgcatcctgaatttttcatttcagtcacaataggttcaatgtttgtattttgtgcaattttaaatgtaaccaaccgcaaaagcacacaaactttgattctaattatttcttttgctttgatctagggatgttgatcaagtgcatgatatgatggatgacattgctgaacagcaagatgttgctaaggaaatctctgaggccatttcaaatccagtcgcatttggccatgacattgatgaagatgaattagagaaagaattagaagaactagaacaggaagaactagacaaagaacttctcggcactgggccttcaccagcactgccaattgtgccttctgcagagcctgctaaagtggcagataaatcaagtggtaagttgcctctttatttaggcaggatccctcaatctctatacagtacttacgctcagaagtgtaaaaatttattgactgggcgggtcgtaataataaaacgagggagctccaaagacaggttttatgaatgggaaggttgtcaaaagtcctatacttttgctaaactgtggtaaaaattatacgctttctgctagattgtggctagacaaggtcatcattttgaaatttctgaagtaaaaggagacaaatagaaaaaccaatttgaaaaatgggaaagctgaaaagttgttgcatcctgcagataagtagaaatctactttgtgaaccaagagagaaagctttttttctggtagttgtataagagtgtctaagacgtttcaaagagagcaaaagaatgatactaaagaaaatatggctcttttttgtgtttcttctactaaattcaatagaaagaaataaaagacgaatcaaaaaaggccaattgaggaattttgttgtgtcatttcatttcagtacggaataaatgagaaaatgaattatcgttgatgaatggtttcatggaactcatgttctccgagattactattaataaataatgtcaagggaggttaaattattcattgtaaaaactgctgccatcacttcagagtcatcagacgagctccaactcgccaaatttaccattctatacccattgctgatttcatgcttttaagatttgaatcggtcagttacagaagggctcaagagccagatatgaaaatacaacaaaaaacagtcaaaactataagaactaacctgttttaaattgcagattaattaataatgtaattacttaattcatcactttaattttttagagctctgagatttataaggggtcgattaaaatggttataccatttttcttgaattatcatttttggcgcttgagcccttttgtacctgaccgcttcaattgtaaataaagtaatgtcctttcttatatgcagccttgcgcttcaatcgcttctctttacatttttgttacaggcaagaagaaagaggaagatgatgatgatatgaaagaattgcagcagtgggcttcataaaattcaccttcccttgtttgtaaaggtaaattcttgagaaatattttcacccaacaatgcttgtctattaaaagcgaccacctgccttttttcattctctcaagggaagggaaattttaaactgaataattttctaacactaactatcgttgtattttaaaccattacaaatagatttttatggtatcaaagctcaaccagctatgttgtaaatgagttcaggcttggttagagttttaaggaccaaactatttgcaagtcattttgttacagtcaagaattttcatacttggctggcccaaattacctggaaaaactgtggctcttgtttttttttaaaatatgttgcaatgtaattgcagcatttttctattccaggtattggaagaacagaagaactagattttacgtggtatactacaaccgatttttcctatcttctcatcaaaaatttccacaaactttacaatatatcaattttgatcttagctttatgtaccgtgctttgctaatcgcaaaaaaaagaagagtgctttcattgcaatgaaaactacaaaacttttgtttgaacggtcatcaaagagagaaaagacgttttacaccaactttctgctacaacagcacatggagcatctcctcaggattaccgtgttttcaaatctaatttctttggttgctctctgcatcattttttctgaagatcactatagtaagtgctgtgaaggaaccttttctgccatcctgtctgttggtaaagaacgtgctagtttttagagtatcaggttgatagttttttaactgttccttcccctctcttttaccatctttgattttgaagaaaagtttcctatttgtgaagtaagattaacagttttcaactcggtgagcaattggtttatatcaatttagagtgttttctttgatattttggctgtgcttctaattttgataagttgttgctcgctgtttttgaggaacaatatttatcatgttaatcctaagtttactctatttaaccatcatctcaaaatttagctgagccatgtcatgaggtgaaaacttctcaaaaatgacatgaatttctgtttttttcaatttatttttaccggaagtggaggaacatttattctaacgaaccattctttgctcataatccaagaacctttttggttattcctgtctacgttaaagctcccttgctatttgtcacaaatgtctacatagtaatggcaaaagtatttgactttgatctattgtatcaaattcaaaacacttattgttcatcatggagtctgagatgtaggtttgttgggttcgaaggttgttatgttttcacatgattcgtactttaattcctcatgtgggaaaacctttggaaccttttctaatttatcagtgacataaggaaaatactctccacatgcattattttgtaatctgagaaataagggaaaatgaagatgcctcctataccctctttgttagcttttcttattttgcttttcatattaagtttaattttctcacctagaaattatctttacgaaagtttgttgaagaaaaaaaggagcaacacagaaaagtacttaaatcatcaacagtggtgattcaaaactgaaactttttaatcaggcagtttttaacacattggaggaaaatgttaccctacaatgcagattttccaagtttaaatcaaaagaaaaccgagcgcaacacttaaaagacataaaacgaaaacctgttatattagtgatcaaaaattctgtagccgaaaagtttgtcaagttttttttaaaactattattaaatcaagacttgatgaaatactttggttaagatgcatcataatttaattacacctgatcgaatttgtcaaaataatatacaaatatgtctataattacattgtcatggcttgataaaataaatgttgcctaattttttttcttgttaagaaaaattacttcgcctcctgctttatttttgagcattagccattattaaataacctttttttacgactgtttctcaaagcgttcatgtgtaaagggaagtggcaataaggcttttgaaggtacttactaacaccttgattgaaatgtagggtcgttaatgaaaaataaaaataataaaaactactcccagttgaaatgaatgactagaattttattaacatttatttattggacaaaaaaaaaagatcagaaaagaggagacgtaaagaaaaacaaaaggaaatcgaatgaaacataatagaaaatttttacaattatgtatatcaaaagtggttctatacacagttctactatttacaaatcattcttggaatgtcatgtgtattaatgtaaatagatttaaataaatttttctcttatttccattttacttacttttttgtttcatttataaatggtaattttacagttatttcaattattttcaatagttttgctgctatctgtgttaaaagaatttcctgatcattctcactttgatttttcgtccgaatttcagctgttttctacctgattttaacctactgtctctcaatactattttctgctcaagcctataaatagcaccaaaatatataatgatgttgatacagatgctaagaaaccttcggttaaatcaaattcatcagtcttaagatatttggaaggtgttccgaattttaaagaacctccatcaggggtttaaaatatttataattggatttttatttatcttgtgagatacatttttccaacaaagttcctccgttaaatgaacaaataaagggaagctgtttacgtaatcagcattgacatgagtaatatcttgtaaatttatttaaattttcgtcttaacatggtgctcaaataaagtatgttagttcaacaagaaggtatcaattattaacacaattaaaattggatcacaatgaagactagataaatttagtatgactagaagcagttttaaatcataacttgtcacatgaggaccctcacctctttcttttacag

SEQ ID NO: 6 - DNA, 4734 bp, Bemisia tabaci
  source 1..4734: mol_type = genomic DNA
taccgtgataaagtaacaaaaacacttgctcaccgagcataataacacacaaattaggaaaataatactgtgaaattccattttaattttagaaaaaggacttcagtttcggtgctgcgaatccatccggaatatttttcggtgatgtggaactgcagggaaaaggttcagtgtttactttctgaatcaccaatcatcggcttatcacatatcagctccaccacttacaccgttcaccgaaactgggcaggcgttttgcaattagcagccttcgaactgtcttcagttttattcatttcgtgtaaatcactctaaaatgggtcttggagactatcctctcgaatatgatcgaaaagtccatggaccttacgatccggctcgctactatggaaaacgtaagtcctaaaatccttgattcagccctttttgacctgtttaaccttccttatcaatcttctgtcatgccaattttcatttgtcctctctcactcttcgctccttaatctagtttcaaaatgccaccaatactctctccagttatcacgaacagactgaagtcagtggcttagtcccaggctaagttcctgcattaccgcactcagacctcattaaggtgattcgatggatgtcatattttgtgtcagaacggcatgcaatatatcgcggcaattggttccattttttcagctactcgtcatttttctcgaattttgagatcgccattctgttgtcaggagactaaagcactcacttaccaattttaacaaaaaaattcaacataataaaggcgtggtttttttagagagaaatcctcgcattcgagtgctgtttcgatatcagtatcgaatgcgatgttggttgaaatgttaactggctatgtcagtaggataagacaagacatagacctacctgtgccgtgtaatgtattgatttacaacgtgccgatataaatttcaacgatcaggctgctggtctagtatctgaaatttcttaccaataaaatcagcgtctccccaagcacctaagtactcagcatggaaagcagagctgagaaggactcaggattaattggaaaggttgttttacacatctttagtgttcatgatgagcaagaatgagtcgatgctgtgataaatggttgaattacttgttttccagcaattgtttaatattatagtaagtatatctcactaatttaatcaacggctctaacttcaacaacaaagataccaaatgcatgttggtagatgtgtgaagtctttgccaaataagactacgcacttttattctgtgtaagaggatcatctgacgccacagcaggaccaagatggcagatcctgtatcgcagtctaaaaagcgcaaactcagttagcctggactcaactgacaactgaagccagcgcattctgtgtcgaaagaatagttcagttctaagtatttgttccgcaccaatgctaccatcacctaaattaatatgctaatcagttatggacttattacaagtagtacaagttatagttatcacctggttctagagttaaaatgacattctcacaatttaatgtacacaatgattgaaaaactttgttttctttcactgaggtctatgcgcacaattttctatttcagcggatacgtacttcagtgaagtgaaattaggagagctgggagcctggttcggccgacgcaacaagtctccttcagctgtggttggagctctcagtagaggtatgtaattgcactttcaaatactatggattgaatccttgtaaatttttccatttatttcttgttcataacctgtatattcttgtaacagcaagccgcattcaaccaatcatagatccccgcaaataaggtaggtggggtaagagtacgcattttttggtttttcccgtatttccatgaccaaatcgacttttaaagcgggaaaagtgatcaggcacctactgcaagccctcgtgcacaaatgccctgagttgtccgaatttagaaatcaaatccttggctgtggcgaattttctaaaaaaaaagtttaaaattggtgagcaggtgaaattttttttttttaaaacacagggtgtctagcatcaggaaaaactggaaaatatcaggaaaatcggaaaaatcggatattttatcaggaatatgtctcatcttttctttttcgaatctcctcagcagagaagtcttactgctttttgcggaccgtgctaggagttgtcgcgctgtctttgtttccgataatttctcacccgcagcgcttgtgttgtacagtgaaagcctcattgcagtgtcgccgtctttgcaaaatccaaattttccatccatcctcagcacctgtattttatttgaaacagtttatgtttttttttttttaatgtggcctgtactccgacaaatcactatttttatcaaagttttgaagttattcataattcgtttgcattttgtgagacgtacgtgcaagtaacagatacaggtaatcatgtctgagtgatcgacgtttacttgcgttatatcattttttactagtttctaatcataagaactttatcagaaaatttagtttttgcatgtacttatgcaataaatatagtttttatgagaaaaatcaggagaatatcagtaattttcaaaatgaaaaaatcaagaattttctataaaatatcatgaaaaattaggaaaatataaggatttttcaatattaaaaaatactagacaccctgaaacatctcctgggctccaaattgctgttaaatcctggaaaacgactaaaactggcctgaaagggttccaacagtgcctaaccacttttactgtgaaaaaaaaaaaaataataattcagtctccacaaactcccaaataattttcgaagtcaattttttttttgaacaggaaaagaaaaatgtttaatcgcccaaattgaacaaaggaacacaaaaatttattaagatactgagttgcctacatcttctattttgaagttcctatacaaccctccccccctccacttttggacgcgtactttggccccattttggctgcgtactcttgccccatttgtaaacatttgacaaaataaactaaaactttgagcccaaggtgtgaaaacaattacggattaaagccaacactataacacttcaatatggtgcctgtccgattttttccatcaactattcttctcacaaaagacagtacaaatactaaaaaaaaaatcgatatttttcgcttaaaaagtgaacttgcctcatagttctgtcaatacacatacgctttgcacaaaacaaaacttcctgaacaagtgaaactcaattttgcaaacaaccacacccggtgccatcataaattcaaacaaagcgcgtgaaaaaagtgcggtgcgtacttttaccctgtgcatactcttacccccacctaccctaacagtttgcacatgtagaaacagttatggttccacaaacaacatacccgtccattgcaccaacagcgcatctaatttatgaaacttgtaaacttcaaaagaaatgattatctgacagaaataattaatttaaacactatgctctgtatcaggcgtataatggcgtatctttattttcctttaggcctgatcttctagaatcccttggatctcattcaaggccattaggactgaaggaaaatgaaggtgcaacagaaaaaattcttcaagtgtaaagcatataaaatacaataacaaagtagttctgcacttcatctgatttcaatagacttcgacttttgtgagtgaggaacttgaatagatgtacacaaaaaaatgctatttacttacaaacaagttgaatgtggaaaaattgtcttgtgctcactatagcacttgagttttgatgagaaaacgtggatcgcgatgattgatttcttatcctgtttagtgatttattatcagctgtttttatcaagatttttactcaagtctgattttgtcctagcatactggcgctggaatcgtagattcaaccactgtcgtattggtaacgctgcttacccgctccaagttataatcggaggagcaattattggatatttgatcaactaccccagaactcgtaagtttgttcttttccttttttttatcacgagtctaaatgcagtcattgccacccctgttgctttctgaaattttttctcagaagaatcaaaagtggatgaaaattgtctaaataaataatacaagcatgctgtaggtttattttcttatgtcaactttcacatctgatttttttaactctcctaagggtaattaatgaattagtttttaggcagtctgtgcactacttgtgtaccatattaaaatgggtaaaactacactgttgtcactttttaattatagtgatgaaactaatcatagcttgatcactcaaaaacttggcatatttgcattaaagcttggtaaaagatgcaaactctctagttgttggtgtgaacttttcttgccttgtgatttatttcaacattaaaaacttacacatttaagatttaatccttacaaaaccacaaataaaaagtcctgtttacaatttttcacaatttttttagaactctgaatccttgtaaagaatggaacattggtatatataaaatacctcaatgcccattttgttccagtttgtttgtttgttttttttttttttttacctctaaattgaaatttgttttgtttcagagaatcacatctataggaagtaccactaa

SEQ ID NO: 7 - DNA, 5649 bp, Bemisia tabaci
  source 1..5649: mol_type = genomic DNA
acctcccttcattggcgctacttgttacagcggcacaggttgggtcactcacaaaacttgtcttcattcctacctcctttttcgtattctctttatgccgttcatgcgacgtttcttatttatatctgagactttataatgaccttaagcttgataaagtatgtgattaactacagttttcttgagtttagcagcaatctttattgtttaggctaaatcaaaattaagttcaatgtagtgaagtttcaagtgaaagtttagtggcagcctggtttaagtttttaacctaacctaaccttgattcggccatggccgtgaccatgacataaacacaaatatttcgttcgatttttcctttgtgacctcctcatctagacccagacgcaggttattttttccgattttagtgtcgctggaagttttgagtgacgcgctacattacgatgacattcttacggacgtagtctgctgtgcaataagtgcagcccccacccacagtattatcttatcagtccacttaactcaacttttcgggcactcatatcattgaagcagaagtgtaggaatcaaatttgaaatgtttaagaaatgacagtgactcgtatttttagtgattttcaaacatcagtgattattattttatgatgcactaaatctatgtagccattacgatgacccttttctctccgctgaatttcaagccttcgagtgtcaaacacctttatcagttgtcctctatagttcctgctccttctttattttcctattgtttagaaaatgttttaaggacaaaccctgattcatttctgagatgcttttgtgcggggccgatagcagtgtacgactcgaaagtgaatgagaaagaaattgaatataatgagcaacagaaaaaagtggcgacatcattacaaagagtgtatgaagaaattcaaagttactcacctcccaagaagggcttcttctcaaagattttcaaggagaaaagcagagctccgcaaggggtctacttgtatggcgcagtaggaggaggaaaaactatgttgatggatctattctactcttgtgtcaaggtattaaagcctcatacaatcttttccatcctacagtcagtgccaaaattactaaattgctgtttggtgctagcaaaaatttgccccctctggatatgcttattgattttgaactgttctttatatctagttcaacaaaagcagtttgtaggaggcaaattttcctggggagtatacttttaaaaaatctaaataaattctgttaaaagtaatgagttggcagttcttaacttccaactgtttgcgctgcagcccacatggcggcggcagcaacagtagtcaatcctcaattgctattggacgacagctgtgcagtcgcttgcggatggaaagtataaattgccaacttatataattggaacttttaattgataaaatttgtcctaaacaaaggtcaaatcaaaattatgcgaggggaaaggaagcattgctcctctagtttctccaaatgataccgccagataaagagcctttaaaaggactaggggaaaagcaaggtttcacaatgatctctattaataaccgtaatttgtaaccaattaatttcatgtacgtatcattatttaattaatgctactgtcttattatttgcattgtttcagatggagaagaaaaaaagaatacacttcaacgctttcatggtggatgttcacaaacgtattcatgaagtcaagaaaacggtggtcaaagatcccagggaaaccaagccaaaaccatttgatccaatccgcccagtagctctatctattagtaaagatgtttggttgatttgctttgatgaatttcaggtatacattcaattacctagtatctattatttttctgtgttatcaatttaaaagggcacctctgtggcagccaccaaattaattcaccatacccattgagatgtagatgacactaaagattaattagcctctggtacagaaaatgtgtacttcaaaataatgaaacaactggaccatgttaagcagaaaggaactaagccacatcagccattgtctttaatttggaaatttatttttttacatgaaaatggttgttcgtatttttttgtgcaaatttctgtaaattttctgcatgatacgaatcaaattccttaaaaatttcaagaaaatctgcaccaacgttctcttgtaaaaaattaaattggtcagttaaatttggcaacaactgatgtgcctcagttcctttgtattaaacggggttcaattagttcgaggctttcagtttaaaaactttaatgttgagaagaagctgtctaagttttaatctattccgttctttgcatagaatcatcttattctaatacaatcatatgtctttctttggcaaaaaaattaactgaattactggaaactcatttttgagatactagtaagttttcggccaaaaactcaattttgattttcagccgaacttcacgaaaatcattcaccctaaaattgcgccccccctccctccccccccctaaagaaaaataatttttttgattaaaaatcacaatattggttcatgttctttatcaaaccgagtgttctctatagattttgcttgaaattcgagtcctgacattcaaatttaacttttttacattttataggtgacagacattggtgatgctatgattctgaaacggttgttcacagagctgtttgataatggggttgtgatgattgccaccagcaatagaccaccagacgatttgtataaaaatggtcttcaacgctcaaattttgttcctttcatccaagtacttaaagatcattgtgaagtggtcagtttagactcaggtgttgattaccgtagacgaactttggcaggcgctggcaagcattattttgtgtaagttagctgtatgaaagtatttaattctcctgatttatgctaatgaagagtgtgaggcctttaattttgcaacttcgtaaactgcctgtagagtcataacattcatttttaaaaagttttttttttatttggtatttattctccttccaaaagaaattatagtaagttaaaatgctgtctacagttctatcatggaagtaatcacccagtgccttaaggtcacggcagagacctatgacacggaattgacatatccatcaatttaccggatctctggcagaaattttgggcacgcgcaaaagtagttcctcttggcctaggaacagtccctaaatttagaatccccagcattttttgttcataaaatatgaggaggagcccagactcttggataagctgccattttgttaaaaatcgagatatcgacaatcagttttcgccaaaaatgttgtttttaagccctttcaaatgatggatcacaagataggggttcccatttgaaaaaaaaaatgttagggtctgccgctcctcaggggggccgcccccccccaaattttggttacgccaaaaagtagttccctttgacctgagaacattccccaaatttcaaatctctagcatattttgttcaaaagttataagggggggggggtcccggacttttggataacctagtataactggctgttacttcactttcattatgttttctcttttttacagtaaaaatcaagatgacgcagagaaagcagtagaaaacattttcaaacagttagtagccaacgagaatgatatcattcgaccaaaaactttaacgatattgggtcgtgatgttgtttttcagaaagtctgtggtcagattttaaattcaacgtttgcagaactctgtgatagagtaagtagcattttttttagatctgtgcttttcttgcttaatttcttaggggggtggtttgcattaattttcgaaaatcttgaactgtgtgggtactcaagttattcttgtaatttgttgcattgcatgctttgataaaaaccaaactgtgtgccactattagtatgtcgcgtttcttttttttttgccctctttatggagattattcttaatgttacatttatacttttttcagccgctggggtcaagtgattactgtatgttagctcaaattttccatactgtgattataaatgatgtgcctcagctgacgttgaaaaacaaatccttagttaggaggtttatcatgttaatggatacgctctatgacaatagggtaagtattatttttttcaaaatgatagcagtactcacggtttgcctagtcctggtggagccttaaggtctggatgttttgcaactcatcctatcaaaatttttatcaagactctctgaactacacttgcgtcgtaaagttttctttttttgtcagaaagaaagaaactagccaattttagtgtctaagactgtctgcagttcggtaacagtagcaccgatacctggtcaacaggtttgtatgcaggttgcattgcaaaactgccataccaagaaagaacatggtatcagccttcagatgttgccgtgcactggctttgatgaaaattcatgaagtctttctccagatttttcagagaagtttttcagtaatttgactaaaacatcgaaaattttgattaaaaatttgcataacttccttcaaaattaacattttctgaaaggaaatttggcaacattcgagtgccctaaaagcgtttttccttagcacagcagaacagaatgagatgcaagttcctgagaacagactgtgtggtttgccagtctgcttttttccttcaaaatgtaattgactttgcaaaataaagttaatcttcagtttttctttcgttgcgttttaaccagggaatctgaaagttcctagtagaatttcgagcaattgacttggaaacagtaaagatttaaaataccaaccaacatcatcaaacgaaatctggcattttacttgtcatctactcttcctctattgtctgaggtccatctgggaaaatatctttgtagtgttagattgcaacatgttgattttgaaaatgaagggttctgagtgtcaaaagatgggaaacattttgatttgccaattttcgattctccaaaacatatcttaagttctctttcattacaggtgcgtgttgtgattactgctgatatacctttggatcaattgttcctaatgaaaaaatctgatggtattggtgaccatgaccgagttcttatggatgatctaaatatttcatcagaatccgtaagttaccccacatgattctcctcagaaagttaacgcaaaagttgccctcttttgactttgttggccaatcaatgaagcatcatatttcactttaaaatttgagcttcggtaatagaggtcaaattttcatctgtgtctgccagactgtgttaggaaccttaccatcctttcagttttaagtgtgtatttagcagtttttaattcattttaaaattctcacaaattttttccatcatctacctctatgaatctctgtttaccattttatttcttctctttttttctaggaaaatgccgtagccagtatttttaccggtgatgaagaaatgtttgcttttgaccgcacagtgtcaagactgatagaaatgcagagcgaagaatattggaatcaatgggacaagcagcgctgagaactaacatctcttgttaatcatgta

SEQ ID NO: 8 - DNA, 23756 bp, Bemisia tabaci
  source 1..23756: mol_type = genomic DNA
cacgattcatgcaacatagacctgacaatggatttttgcaacgcaggataattaaacacaaattgcacgagacagaactgatcacatcacattcacaagattaccgaaagacagttaaataaagaggcgctctaaattacctaaagaggagtccctcttagaaatacgaaatatttaagatctctgagccaatgcataaaagaaatgtgttgaacttaacttactaccaccggaaacaaagaaaaatatgcactcttacctatggtggaagtcaaaagttatacgcacaattttttttgcaccaattcatagacttttatgaccaataatgatcatttatccacagctttcaaaaatgtgacctttgacaaaaattataattgattgtttaacttgtaataaattttaaagataaatttaagaaattgttgctgtagatactagcttgaaatattgcgatacccaagcggcctagcggtagaatattgcactacacaggatgcgttgcccctccacttttccgagttaagttactctaccgtcgtccgtcagcgaccactcgaatcacagcccgggggctggtgttatcaatttgtgaattagtgatccctttagaaatgattaaggccatttcaagaggtggccaatttggtgctttttccaaagccaccgctcaagctattcctcctccttcagcatccgtgcttgtacctgctactttacctccttcatccaaaccccttgtggaaattgatcgttctttgctcacatctgactcattgggcaaagctgtatcttcaatcaacaacttcggagttatctccggtcctggaggtaatgctcatgattcctattttctctttaccaagtccgtaaatttatatactttattgtcacttgggaataattctttcgaccatctgccattggtgcatcaaaggtcagattgtaggttaaattattttgacaacatattattttcttatcattactcaggtgttagtattatcattggcaacattaaatttgcaagttattccaaccggttactccctggatgattgtagtcttaactgtgaccagtcgtttagccctcttccttcccaattgggtctagcgaccacagacctctatggctcccatcggtgtaagcgagagttggttccatagcagttccatcgccagaatttttgcgaccattttcgatggaacagggatggaaaggcgtgcgatgttaaatattaactgataaaaaggaaattgttttcaagcagtcactgtctgtgatgcatttatcgaagaaaactaagtggtttggaaaacactgatggcgggagatacgctaacctcaaaatttcggtttgaaccaacaacttgaaccaaatcaacttcgacgaccaacaagtgagaagcacgtaaacataataagaaccctaacctcaattttgatggaatcaagcagtgccatcggcccattagcgacggaacagctttccaaaggccgttttcagagatcgaggtaggccaccctcgctggatactccattgaaaaggagcctagtttgatctatatcaatggaagtgagaagtctgcggttgggctgctggagcctcctgtgatctttggtctctcgtattttttacaccatttacagttggtcaaatcctctttcttttatcagctccagcccacctacaaactagaggcttcaaagaggttcatcgatgcctttcctggccctctcattggccagtggtctaagtcggggcaatcaatgagtctctttgaagcctctagtttgtatgtgggctgaacgcttagggcccactctgcacagaagaatgagcaattagtcacctatgaatctctagtatccaatagatctctttattggacgtagctcagtgccatgagagccttcacttgggatgttttaaccatagagtacatagagttatcatgcaaatggtagagctagcgccatgttctggtcgacgagttccgagtccggtgtgtgtcgtgcttgtgcttcagtcactttttttatacattttcgatccaaaatagcggcaaggaatatgtagtatttcctatattctttgtttacattggatggccgcatccccatgtatcgaaagcactcaattatgtaaaaaaaagtggcccaacgtcacacaggtgtctcagaattcagaacctggtaaatgttcaaaagtggtgccagctctcccacttacattacgactctatgttctctttgaatttaacccaacgctttgtctccacgggacgtctcaaaggatttttcctaagttcgaatcacaggaatgaaacttctggccttttttcacgttaaacaacacaacaaaatttcttcctcttttcaagtcgttcttgggacttcacaaggactcttagttgctactgtaattagtactgactaactcaatattttccctaacttcgcaagtgagattgttctctgggacaagttccatgaaacgtcctgtggagacaaggcctaagttagcctcatttaggaaaatgatctttctagtgatcttaaacttataaagtggctgtttgtctgaaacacaggacccctgaggctgaaaataactaaacaggaataatagcaggaatgagttctgacgtatacatcatttgactttagtctcaacatcaataagggagcttaattatgcagcaacaagaaagaaagcaatacttgactccgataataaattgtgaggaattggatctaaatacaaggcttgcccattgtatgttgagaccctggagtgcaagtctgaatgtatcagcgtgggatcatcccgtaaatggtagctacccagccccgtgtaagatcagctaaagaaaggaacattcatgaggacttacagcagtaggtctgggctgtgcatttttcgagttgaaccatcaatatttatcatcatccaccctgttgcctagagtttttagatttctgtttgaattcatgtaacgttttaaaattgtattacaatagaacaagctgcaagccgataattttacttaatggggcagtggcagggaacatcacagggttagtgcaatctttcctatattcaagagcctgatgcaaaaacgatgtttttcgcccccccccctccccctctggaatgttttcaaacttcgtctaacaactactcatacaagatcgcttcttttcccaaattttcagatccctaaanggggggggggggggggggattccaaacctgtgagtatcgatacctatcttttgaatgagaaaagatattgaggtccggtttggacgaaaaatcgtttaaaattgcatactgttgtaagattcgataggtccaaatcccaaaatcacattttcaagttaactcatgtgctttttttcagtttttgagtcaaaaaattttcttccaaatatgaaatacactaagatctcaagttttcatttaaaccaaaaccagtcttttaaattgttagtctttttttgcatccaacgagtggtccatggtggtggtggggagaaccaaacggttcgagagttatgaacgattgcaatttccgctctactcgcgccgaccgatttatttttaatattgattaatattgatagattacgggagtagaacacggtgaaatatttcggagacaatggaccactagacaaggtacgaatttaagcaatctgatgcatatttcttaaccagaatttcacgtagaacacgattcacactacgaaaattacccaaatcaacttctaacgaagatattaacgtttttatttcgcactgattacgaggaatttgaactgcccgctcccaagaaactcaaagctctacgtgagtcaaatcgcgcactacaacggtttcagcaagcttctcaatcgagcaatgttcattttccaccatgtgttgttcaaactattggtaatttgctatagctgagccaaagtgtcaagatttttacatcgcagagactgtcatgataaacatttagcgcgcgatgtgaatcacgtagagctttgagttttcatgagcgggtggtttgaattcacgcatcaagaatcattaaatatcttcgtcaggagttgattttggtaattttcgttgtgcgtatagtgttctacgtgaaattttgatcgagaaacatgtatcagaatgctgaaattcgtaccttgtctagtggtccattattacggctaatcggtgggactcgtatgtagcgctgcacagcagtaaaatattgaataacagtcctgggagggcacattgaagccctgtaaaattctattcttaaaatttcagtattgacacatttgagctcaggtttagcttggcagacggatacacccttctgcggacgatcagaagaactggaatgtagcgtttccgagctaattatttgttctgggtggccacattgaagccacattatatttgtttttcagtgtgccaccgtgttttactcccaaaatccattgatgaagatacatttgagcttaaattaagcctggcagatgaacacaaattcatacggccgatcggtgggcctgtaaaaaagttttccggagctgttgtgccataagaaataatgcaactggcttacagaaacatgtgtagtttaatgatagaaactgaaatgacgaataccaaacataacagaccagagatatcttgactcaaaagggatgacaaggtagaaaatttacgcatgatccctatgtcacttaagccttcacttggtgcatactggagaaatgctcagaaactgcattttgatggtaacgatgacgcaacagcgcgcgtagagcggaaacttcaattgtccataactcgaaccgtttggttccccagcttaatggaccactccttggatgcatataaagactaacaatttaaaaaaactggttttggtttaaataaaaaaatgagatcttcgtgtattccatgtttagaagaaatttttttgactcaaaaactgaaaataagcacagaagttaacttgaaaatgtgattttgggatttggatctttcgaatacgacagtatgcaattttagacgatttttcgtccaaaccggacctcggtatctttcctcgtttgagagaattgaggtttacaggttttgacttcctcaccccctccccccctagcgcctctccaaaagtttttgggggtcaaagaagcgctcaaatacgagtaattgatagaccaagtctgatccaatttccgaggggggtgggcgaaaaacgttgtttttgcaacaagctctatcgtgaaaatactgaaaaattcataaaagtatttcttagagattaagaagctaatcaaaatccgaccaatcaaaagccgaaagtgaagttgatgtagctaggcgaagcctggggctgcattcagccaatcagtaaatgcagtttcttctgcctggctacatcatcagagtccgccaaaaatattgtttcaaactcgtctcatttttagcattttcgaacggggtctcttcgccatttagaaatgagaaaagtcgtaaaaaattaccagaagttcagcccactgcatacttacaaaaaatcaattaaagaaaataggtgccactgacccatgcgaattaaatctatgtttggaacacttcaaaaaccgttcagaattaatcgttctttcggatatcaacactcttcaaactaacataagtagaacatcgcagaggtgcaaaacttctgtgaccaaacagcggattcggtagcgccaataatttgaaggcagccgaagaagggttttcgagatgagaaggcacctgaaaagtgggaaaaataagaaggcagcacttatttttgtaactgaaacatcaaatatgtatgttattctttcaaaaggaaactgctaagtgcgttactttcagcgaagcaaacttcgaaccgtgtcccttatacaaaaaaaatagtgaagcctaaaaatatctgccgcgatagccgagagagccataagtgcaaaattttcaaaatcgagttttcttcaaaattcgtctaaactcttttagatgaaattactgagactgctaactcagcaaaattcatcttaatttaatgaaaacgaaatatatgaaaaagctgtaagtgcacaaaaaattatatagtttttttcaagacagccgtaggtgtatgagagccaatgaaaagagtgctttcaagaggaatgccgccctcatctgccgatttctaacctgaaaatgtgtttgttgtgtgttcaacacgctaccacaaaagcacgcagaagatagcccttaccaaacactaacctaacatgaaactgaattttacctttttcatgtacttaaaaataaaatcggtagagttttaatcccccaaatgatttttaagagtctatcgaatgatgggttgcgatttgactaagaacggaggcttctttcaataaaatattccactcagaagcttctaggcccattttctcaaaacttcatttttgcacttacggttctctccgctatcacggcaaatatgtgaaggcagtaaactttccgcatccctgggacacagaatgtctcaacttgagtaattctctgaagccaaataaaacattcttgttcatattagcttcagcaaagaatagtaactagaaaaccggattaccaggcaaggtattcattagatgcactttgttgcccaaaattgagcacttgagtacagtttttgaaaaaattgaggcaccctattaatagtttcaattaaaactagcctaaaaatgtattcggtaaacgattcaccacacaaatcccactaaatgcatccaaaaatgagtatgaactctctctcagccataaggctcagagtaattttgaaactttaaacatgtaagtatgtcttgaaatagcaaaatctgtacctatgggccttgtcagcttagcccctgaagtagataattttacttttttttattctgtttctaaatcttgaatttatgttttaagttgaattgtaacagctcaagctgtcggcatcaatttatatttgtatcaagcattcggaaatcactgtcgtccattcttcctgtcttgagttttttggattgattactttgccgagttggatgcaactatgaaagtggtgataatattcgttttaaggttgttttaatcctaaagcgagatcttgcatcactgtcatgattgtatcgactcttgaaaagtattattagcacggaaaaacctcaatctggaaaaatggacgtcagcggtttttgcacgactcaatccaactgttagctactcatttttcagcactgaaaattcgcataaaaagtatatgtatcgaaaagaaaaagtttcatatcctcttcattcagcacaacttcaatctactgagcaaatctttttttttggggggggggggggagtgtgggaagtggtatcagaatgagctggctccaacagtatctcttccaatcccgaatcccgataacccagaggatgtgagggagtatcaatactaatgaaaaataataaataaagaaggcaaactactttactagacacctctctcacgaactttgagaagcctagcaggatcctctgatttagagttgtctggactggttctaaatgtagactaggggttcgctattaaccgactggctagcactaaactgaacaaatctggattctcttagaagatcatttacgaactctttacaggaaccataacaatgagcaagagaggttttgatacaaatataccaagttgaaattttccattggtcagtgtgctgatccagatttatgtactcagatatcattcattaactgatggaggtccaaaagtaatttatttacattttctgcacgccacacctccagcatcactgaatgtcgtcacttttgaatctcttcttttcagtgactactcaagtgagatttgctcacacagatgtcaaagttccagactttacagcttataggcgagactccaccaagagcccgacctctgacaatgacaagtctcttggttcccgagctgcattctcttatcttttcactgcaggtaaagcaatgttaagttcaaacaatcatccgagaagtttcatttatagcttttcatctgtgcctaagactttatcactgaaaatagttatgtccaaagtatttgtaaattattctcttatcatttcatggtatatatttttataatttcttgtatttattttatataatattgtgaattccccgtgtttgcaaaggaggaggctcctatccgaagtcttaggaaaatttagtccttagggaactaaaacttgcagtgtaacctctcctattctgggcactagtaaaaccacttgaccttgtgaaatttgtgaattttgagcaattgaatcgctcacacttgaagaggttatacctcccaagaactgaaaacctaagctatatgtgatgtggtagcatattaacagacaacttgaatatcatatacagggtgggccagaagttccaggacggtcggctaacttttgaacggttcgagatagaaaaatgaaactttgggaattttcctatctcaaaggggaccatcttatgggggagtcaaaattttggtcccccctaagggagggggcggggggcccccaactttttttttcaaatggcaacccctagcttgtgatacctcattcgaaagaccataaaaaactaagaattttggcgtaaaccgcagatcaatatcttaatttttgaccgagttatgataggatcaaaggtcaaatttgacctattttcaaaaaatcacaactccggttcaaattatcgtaaagaaaaaaataaaacgggaaaatttactaattgtgttcgcttttttttaaaaaattgcagaaatcacttcgaactaattttaagggggattcggacccccaactacgtcaattcaaaggtcattcaattttcccgtgaaataagccaatttcccctagatttgcctccacattatctcaataaggtcaaaatcagttcaacattacgttgggcaagtccccaaatttcaggaaaagttaaaaaaacgcaatttaaggtaattaaatttgaccgtttaaattggttttttttttaacttttcctgaaatttggggacttgcccaacgtaatgttgaactgattttgaccttactgagataatgtggaggcaaatctaggggaaattggcttatttcacgggaaaattgaatgacctttgaattgacgtagttgggggtccgaatccccccttaaaattagttcgaagtgatttctgcaatttttaaaaaaaagcgaacacaattggtaaattttcccgttttatatttttctttacgataatttgaaccggagttgtgattttttgaaaataggtcaaatttgacctttgatcctatcataacttggtcaaaaattaagatattgatctgcggtttgcgccaaaattcttagttttttatggtctttcgaatgaggtatcacaagataggggttgccatttgaaaaaaaaagttgggggccccccgccccctcccttaggggggaccaaaattttgactcccccataagatggtcccctttgagataggaaaattcccaaagtttcatttttctatctcgaaccgttcaaaagttagccgaccgtcctggaacttctggcccaccctgtatataaactccaagacctcctaattttgcgtaactggtgacgcttagttccagcgttctaccgggccgattttaatgatttttgcggctatcgacgggcaattgtccctagataagccaactcttttcagattttcaaaatatggcccaggttttgttatattacatggtaaagttgcgaattctccaatttaaacaatgtaaatttatactttttgtcatagttcgtttgagcgttctaccgggccgatttctatgatttttgcgtaaatcgacaggtaataggccctagatgagcccgctctaatcagattttggaaataggacccaggtttctttaaaatcacggtataaaattgagtgaatttacggaatgctccgggactgctaccgctgtgcgcgggaggatgcgcagtggtcgagaaggttgcgcagtagctgggtagcctgcgcatcagctctatacttatctacgcaagattcacacccaatatctccataagagcggtggccgagtcgtctaagacgttggatgcgtccgcttgaatcacggtgtgggttcgatccctatctcctgactattttaagtattacctgatcatcatcattcgttgttttactgcaatatttcatcaagcagtcatttcaaaacgcgtccttttgacttcaaaaaaaaaaaaaaaaaattcttcattcatcataaccaaatattatttcattctgaaagtaaagtatacctcatatcgtaattttttaggggaaaaataaaatcaacattgataaggggtaaaagggtaaaaatagggccgcgttgcggtcagggggcgtagccctctagtataacaatactagccgtgattagctggctttgcgagctgacacgtctagctggggagtgcccctgaacccagtcctcctcttcgcgatgaacctgcgactcgctgcgcgagctgccaccgccctgcatagtttttaacattgatgagaagacaacatctatgtcttaatcttctttttcaccaagttttacagaaattgatgttctaggagtcgagaccgcatttttgtgcgggccgccatcttggattttgaaatgttgaaaatctgactaaaaattcgagtttcccgtcaaaaatactccctctacttccgaatttcacgaaaattgatcgaacaggagcagacttacaattagcatttgaagccacggccgccatcttggattttgaaatgttgtaaatctgaccaaaaatgcgagtttcctgtcacaaagtacccctgcatacggagtttcacgaaaatcgatcgaacagaagccgacttaacattttaggcaaaggccgccctcttggattttgaaatgttgaaaacctgaccaataattcgagtttcccgtcgaaaaataccgtaggataccgagtttcacaaaaatcgaggaaacaggaggcgactcagcattttaggccacggccgccatcttggattttgaaatttggaaaatcttaccaaaaattcgaatttcccgtcgaaatgtcccccgaacaccgagttttactgaaatcgatggatcaggagccgagaaagcattttaggccacggccgccatcttggattttgaaatgtttaaaatctgaccataaattagagtttctcgtcaaaaatacacttcctcataccgaattgcacgaaaatcgatcgaacaggagcagacttagaattttaagccacggccgccatcttgaatttgaaatgtttaaaatctgaccaaaaattcgagtttcccgtcaaaaagtacgccctgtcaccaattttcactaaaatccgtcgaaaaattcctcctaaaacctgcaatttcgtctataaggctgtgacgtcacgtgacaggattgaacctgttcggcgcggtgcgcgtaaacaaccgcgtatctccaatgcaatactatagggagaaacaacttttccatgttgcgggcgtcctaggcagcggattggaatcggaataattttgatcaactcctcacgacaatagctaagcgtgtaccaagtttcaaggaagtcgctgcggccaatttttctctagggggggcagagtaagtgggaacagcagctttacaaagagtaataagaatctattcctgaaatgtaaaaaggtgatgaacagagcacaggtgagcaaccggcatggcatggcgcaggcccagacggacaatactcagctgtgctgacaaccaatcagagaggaaggtggctggcgcaatgataggtggcaagtgctgctaaccacacaccttctccctttaaataaaaaagaatcgccctgttaaagatactaagttggcgtcaatggcttccacaaacaatcatatggcgttaatctcctttgtaaaaatgtttcttcggcgttactcgccttcgtaaaaatatccgtagacgttagttgccttaatacaaataatcctttgccattagtcgcctttgtaaaaataatcatttggcgttagtcgcccctcgatactgtaagccccgagacctcctaattttggataactggtaacgcttagttccagcgttccatcgggccgattttcatgatttttgcggcgatcgacgggcgtttgtctctagatgagctcgctctattcaaattttcaaaatatgacccaggtttttttatattgcgtggtaaagttgcgaatcctcccatttaaacaatgtaaatttatatttttttgtcatagttcgcttgagcgttctacttggccgatttccatgattttagcgggtattgacagaagataggtcctagatgagcccgctctaatcagattttggaaataggactcaggtttttttataatcactttataaaagtgagcgaattttcagaatgtcctcacgtgctgccgctatgcgcagaaggttgcgcagcggccgaggaggttgcacagtggctgaccagcctgcacattccctctactgtatgatcgcaagattcacccgatacagttcaagcaggtcagtggttgagtcgtctaaggcattacgtgcacacctgtgccgatctgcgatgtagattcgaattccgacattaaatttcttattacgacctgtaaatcatcttactttgttttactgcaatgattcatcaatcaatcattgcgaaacgcatcctgttgacttcaaattttttcttcttttatcaaaaacaaaaataattttgtttttaaaaggaaaatatatttcatatcttactttcttaggggaaaaatgaaaccaacattgataagaagctacaggagaaagacgcgaagataaaaatcggaaactaaaggaaattttaaaaaaaatataaacggataaataaataaaatgaaaataaagataagttagacagcatcgatggtctattaggctcttactactttcgtcatgaaagttttgctgagattttttaaacaaatgttatcatgaaaatgtgaatttttttaataatgctgcggtgacaatatagaggcgttaagcggccccttgatggcgcggagcgtcttcagggggttgggccgcttagcctcctagtatacaaatattttactgatggtagtcgcccttgtataaaataatcatatggcgatactcgctttatacatggttggcggtacaagctcatttacatgagcaatacttgccctcatgaaaacacaaatctggtgctttttgcctgaatagaaacacatatctcgcgttaatcgcctgaataaaaacacgtgtctggtttcaatccctgaataaaaacacgaatctagtggtatttgccgtaatgaaaacacgtatttggcgttaatcgccttgataaaaacacgaatttggctttagtcgcctttcacacccacaacatccttcattacatacttatttctatattttgaattcatattagtgacaatcaagcatatttctgaaggcaatgataataacagcattactttagccccacagaagaagcttaatataattacattcttaaaatgcctaaactgtgttgattaattatttcatcacagggtattccaactaacttatcagcttaaaaaaaaaaaaaaaaaaaaaattcactttgggccaggaaaatattacttcaatttcctgtacacaaaatcatcctttaatttctttttaactcctctacctgcatttctaagatttagtacctgattaattacgtaaggtctttggcttcttttttgatttatacttaggagcgtctcataaggatttgtgttaaacccaagaaagtcacagtcagtggtagatggtactgtgatatcactgtcactatcgctgcaactgtaaggcactgtaaaatagcgcaagagattcaatttccccagttatactagcctttgcttgctggtttgtttcatctatgtgttgtaccagagcttcattatattccagcgagtctggcaatcgattggagcccttgagcttgttcagtaattcgtaattcttgcatttttggaaactagagagtgcacatagttcacaggaattttccccgattttttttaacaatattaacccacgaaatacgagttcaaaactccgtattttgagctcccatctaaacgcgcgctgcttgggccatgtcaaaatggcgcccattctatccgtccggcgatggccacacttttgacctagcgtgccggcgccacagaatatataggctttattctgtgccggcgaggtatctctgcatgcctctgccgcgtgtgggtcgtgaagattgattacacgaaggatccaaacaactcgaaatccctggagaaacagtgaaaggcaacagggaagggcatttgaaacgatcgatagaaggattttagtgaagaaactggaaaagataggaattgggggcagggcattatcatgggtgaaggattatctgcaggaaagaaagcaggcagttaattggggggaaagactctccgatgaattatgtgttgaactgggggtgcctcagggtagtagacttggaccagtcctattcttaatttatgtaaacgatctaaagggtgtattgatggattgcaaattgagaatatttgcggatgataaattgatacacatggagggggagacacgcaggggggggggggggggtattacaggaaaaatccctgctgacccaaattgtgccaaaaaacggtcgtttttggcgtcgctctttacttgaggatgcctgttagtatgttgtgtttcctgcagcaatactgcaataaggctcaccatatttcatggaatgaagtgatcaaaactacttacgtacctacagcctggtcggtttcatgtctttctagagtgaaggaaatatttttatttctctctttttaagaattcagggtgagtcaaacctgtctaactaaaattttaataaaatccctttgttcaaaaccacctaagaatcatttcaatggtaaagttgccgacgattcttgttgaaagtccctaagtcagctggttcactgaatttctcaggtacctacagacggatggaagaattttgaaaagacatggaattacatccttctataagaataagtcaggaacacggttaaggttatctggggatgacatttgtaacatttcgttgcatgattttataatcgaagagaaacagaaagtctgaaactctgtaaatctacgtaagtggttttctagttaggccatgacattgatatgctcgttttgttatcaattattctccacaaaggtaagcatacttacaaaaactgttccaaaacaattgcgaatgtaaccttgtgatatctaagtaactttacataacttacctgttaaactaccagcggcccgattattattgaaactgtgacagcccgacatgaaaagccatagccctatcttgaccatgcaatatattggaatttcatgtcttgtcgggttgctttaaattttcagtaatcggcctgctgatgagttgcaaaatatttccacttccaggcgaatggtcatgtcttcgttgatgctttcgaaattgagttgtgatgtcgcttcagccgcagcacacaccagaaaattccttcttcgatcggacctttgatgattcactctcggaatagctttgaactgattaatgataaatgacaccatatgagtgtcatttattgatgaatcagagatcaaagtatatatttgaagctgctagagcagtaattttatcagacaagagtgaccgtctaaatgcaaaacccatgtaagacagatctcagaaactttgcaccaccgcaaggagatattaactgactatctatacaccaaattatttacgcaactaggtgaatttctttggtaaattacttcgcttaagagaaagtgctgactgtagaaaaaaagaaataatacccttaccgatagcgtaactgtgtatatgcactagagtggtcacttacaaagaacagacacgaacaaacacttatgacaaacattgaacaagagagcagaactggattaagtaactgtagtctctaatttagttctaaactgcgaatttgaaaaaccataagatacacctcaggtgtgtaatcacttggttcaggcctgagaaacctcaaactacatgagatcatatcagtgaggtttgagaggtcaaaaggctgtaatactaaataaatagtgaacttctaactcctgaacgaattcaggaccacatacttaagacaaagaaactgcaaaacatttgatttaaagcgaaaatgaaaagagaatggtcaaaaaaaagaatgtctgggtttggacaatgaacttgtgaaactgattttccgaatgcactttaaaatgagccgataggccgtggttgcaggttgtaaaatacgatgaatattattgccaaatgcttggttgaagtcgaaaatagatttaaatgaattaaaattaagagatttcgagttgtttggatccttcgtgttatcaatcttcgtttgtttattgtttacgacccgcacgcggcagaggcatgcagaggtacctcgccggcacgctaggtcaaaagtgtgcccatcgccggacggatagaatgggcgccattttgacatggcccaagcggcgcgcgtttagatgggagctcaaaatacggagttttgaactcgtatttcgtgggttaatattgttaaaaaaaaatcggggaaaattcctgtgaactatgtgcactctctagtttccaaaaatgcaagaattacgaattgctgaacgagctcattggagtactcacattctccgtatgatgtaaatgagacgctgaacctacttctgatgtaccgccagcatgttcttgattagaatctgttcataaattcatagttgaattaatttgctcaatctcaaactcctcttcaataatgtcctgtggttctgccttatcagcagacttatcattcaagtaatttagttcatctgtttgatcattctccaagggtctgtaattcgttcgtagaaatgaggaatttcttcttaaggtttgccccaattcaatgtaaactctataagatgtaggaggatattcaagctttttaacaatttgactgagatccattcattattgtttaaaacgaacacagattcattagcggcaaagggctggcaaccacacactatatctgttcactgcagtatttctcagtgaaagtgcccttgcttctccttctgagaaaagtggcctagtcctaatcaacctattttttggtatgttgtaggtctggaggcactgataaaaagtgtccataggtgcctctcctatttcgccattgtgcctccttttctgagagtgagaattgagcatttagtttttaattgattctgatgatactgcaagttgaatttttgccctttcaaggtgtctaaacttttttttagtacatttgtcttcgtctgaatgcagtgtaaaacatagagacctacaaactaaacatttctgttgagaaaagtggtggtgccattgaactccgatgagcgagcccatgtgagtcttattaaaaggatgcatttatcaccttttcaggccttttttggtgtatgaggttgatcgcaatttgaaattttgaccatgatggctctcagaatttgtcaaaaattgaatagatttttaagtacctgtttatttttcatcaattaatgtgattttatttattttaagcaatttcagcggccgtgaatacttatgcaggtaattcctaattcaaaactaatttgaacttcagagaagactaagtttactcaccaataaaacatgctttagtaatgtgtgaggtggaaaagattaggaggaaactagtgataaataaattacatattttttaattgtttttcttccaggtagtttggctggtgcaatttatggaggaaagggtattgttcacgcatttgtgacatctatgagtgcttctgctgatgtattagctgtttcaaccattgaagtaaagttgagtgcaattccagaagggcaatgtgttactttcaagtggagaggaaaaccgctgttcattcgccacaggtaaatgtcacctactgggctgatttttttgaccaattcataaacccgagatttgtttttctgcatataccatgaagtaggtgtagtgaagtcctattagttgcattgtgagaggctgatttcagcaggtggcttttgccaggtggtctttttctttgttaagtgtttgccattttacggcaaattttgaaaacctttgctgtctggtacttctgccgtgccattaagtaaatccttgaacgattcatgtgaagtttgagtcctttgttgatcctagggcttcttgctatcgccatccatttttttagcgaaaattatattgatctaaatgaggaaaaaacagattggagtaggaattcatttttcctgcattagatctactcgaaatggctgagtcttacgcttcacatcataaatcagaatctgcagaatatttaagagggctaaaatcggactgaggacctagagcgtagagtagaggtcaggggtgtaggaacttcctgataacaattcaaaatcaaattctaactaatcgggcagacgacgacgcggatagcttacgttagtcactggttaatcctccgagctctctggtcgacaatcctccggagagcagactggagagtttagcaatgcatgtagtatatctcatctcatagtcatggcaggtctttcatacaacacaccagattcatgtttagtggaagttttatctttcaaattgcctatttttttcagttttagggtggacagaggggttccatagttttttggattatctttgaagatcctctgtatgtacgaagtactatcataaaaaaatcgctaaaggccccatagcatcaagtgacgagactaagtggtcatgccaaagagttaatcaattcctgacttccacacagttctaatgtgattcatgtatattctgctgtatcgaccaaaacttgattttttacaaaagttcctttattttctccttctagaaaaaaacaggatggtttacttcagaaaaaccagggaatttagaatattgacagtactaaaaactcttctcctattttagtttttcccctgagtgttgtttttttggttctttgttttagaacccaagaagaaatttctcgggagcgagcagttccactcagtgacttacgtgatcctcaggaggatgaagttagagtccagaaacctgagtggcttgtagttctcggtgtatgcacccatttgggttgtgtacctattgccaatgctggtatgtgttttttactgtttctttcacttgtagatggctaagaaacaataccgcctacctgtcaactaacatttttacaggaaaaagaaggaacctcgtcatttttgtaattatctggaaaaactagaaacatcagcttgcactactctgtatgaagctgctgttcccactcactcacctcccctccccccccccccncaagaaaaattgactgaagcaattatctttaaacttggtaaacgcttcgctattgtctttcttgaggacttgatctaaactattctgctttgaaaatgttgtccaggatgcccacaagagtgaaaagttgctcctccctacatttatgcattggagatacaaggttatttacgcgcaccgtactgaacaggttgaatcgtttcgcgtgacgttacagcagccagtaacagcaccaaaattatagatgaaattacagactaattaattatgacgacaacatgaacaaagttacagacatagcgatggacaaagccatagataaagcgatggacaaagtcataaataaaccgacagacaaggttgtacacatagctatagacaggtaggcaggatgatagacatattattgacaaaggaatcgctgaagtgatggacaaagtttaagacaaagctacaggcaaagtcacccactccgccaatcagcgcagctcattggctatagctcgctacagtcgcggctatatcagctgcgagctcaccacatcgcactgcactgaacaggttgaatcgtgtccggtgacgttacagcagccgcagcggcaccaaaattacaaacgaaacgatagacaaaattatgaacaaagctactgacatagcgacgaataaagttaaactcagcaatggaagtcaaagataaagcgatggacaaagtcataaataaatataatagcttccctcgatcactgccctcgataatatacttagcgtgcttacagttcgagagacgagtttccctaagatttttgcggatgtcctttaaacgacaatttttgtaaaaaattttttttaactatgagcgcatcatctaactaaaaccaaaccagggttaaaatgtgtcctaaagcatccttaataacatatcaaaagctcgttttagttagacgatgcgctcggtgtcaaaaaagcctcggagtgatagaaaaacacgaattttcgctaaaatacgcttgcagacctatgtttaggcaaccgtttaacacgtatccagtggcttatgggctaagtcatgattatttccgtaaactacattaagtcaaccgggaaaactcacataaagttccagattctaagagggggtcaaaaaggcccttatcgatacccctcctttggggtggggatacccctaaatatccctaattttaaaatttttataattgagctaagctacagcgcttgacggatctcgccaaatagtttctcgtagaggcagacgagctttgagcttcaaagcaagccacagtttctatcccaattgaatgatttacataaaaaacgacctacagaagcataaaaacttgtgacctgcgggcaatctggggggcgcatgtgaccttgagactcggaacatacaaggttcctgcgcgccgcatcaactttgaagactcataactctgcttctaatagtttccccacacttaacttgggttttttttaaaaccttaaaccctctacttttatttaggatggtttttgttttgctccgtgtgaacagaacgaacgaaaatctcgaaaaacgaaaatttacaaaagggggaccttgtatcattcccccaaaagtgggttaaatttcaacattttattaatttcatacttatattctgaaagttctcattttttggaaactttggcattaagatcatctttttacgacaaaccgttgagaagttatggtacttttaagtttctgactttgaaccccttcccccttttccctgggggttaggcaaaataatatgaccagttttgagtgtctgggcaggccccctttaatccctgagaaaatcgtaggattccgtgtttaggctgatttggccgttttgttgtaaaggtcctttgcagttttcaagaaaagtattaagttcctgccaaaagtgcaaagaactgttttgaaagtatattttgctttaaaatgagtgttcgtttaacactctgcgatgactcgttcattagttacagcagaaagaaaagagattaaaatcccgacaactttatgagaaatcgtgttttttggcagctatcatcatttttttaccaacagtattgagttttaccagggatagctatgaatcttgttgaaagtaaatgaaatgtacattaaaatgagtgctcccacaatattgagcgatgctccgttactgagtaacatgaggttgaaatgaccccatgatttcagttatatgctgtgaataacccctcgttggccgttctgtgcattctgctattcaacaattggacgtatttctatcaaacagaactaagtgcagagggaaaaatggggtgcgcacgttggtgcttgggtcataagtgttcggtttcacatacaaaataataatcataaagcatagagaaaaaaaaggaggtgtttgcatttcgggcatcttggaatttttttgatgacgtaggtcggtacagcaacttttttcactgattttcttgaaaatggtgtaatttataggaaaaagtcattctataaaaagtgcttgaaattatatcataaattaatttaagcaaaaaaatgggacattatggtccgtttttcgtactgcgaattccggatttcgctggccaggttgtaccgacctacgtcacagggtaaacaaacctcaagatgcaaacaccttctttttttcctctatgatcataaagaagccaatcacagtgatgaacccgggagcaatgagctccgcatactcaagctccaccaatgggacactgagaactccattgtccccagcctcagaatgaccgcgaagcagcgcaccaatcacgaacctcgcgcgggcgcgcatttcaaacttggtctccacggcgcccgccaagttcaaacacgcattgcggtgctcccgccaatttctcacaaagcgcccgcattgaccaatcacagccaagctcgcggcaatgctctctacgcgaccggtataaatactgggacgcttcgctcttagaacctacttctgagtgatgcgtcgtccgatcaacatcctgaatccagatccagccatgcagcgaagcaagttaaccaagaccaaggaaatgaagattcaaccaaggtcatgtagcagctaacaaggaatctctaacccaagtcaagaatgaagttccccgagcaacgtcaaggagcaaattagcgagcaagctgtattgcttatagctattatcataaaaaatcccaattttttagtgtatttcagagttttagggccatccctccccccccccccccttatggtccccatatcgtgtcgaccttttagtatgatgttaaggtagtataactagagagattcccaccaaaaaagcttttgttgtaatttatctcgggttgaccccccttttttcgcaattttgacctgactagaaaatgaaatcctacagttttgatctgaaaagtgataattcgattttcttcatagtacgacttttcttcttgggatataattgcattacctgctcaaaaatgaagacatcgacttaaagactcaattaacataagatattggactggagccacttttttatgagactaggtgtcatttacgaattgttcccttcctattctctatcccgtcatggtgctgaattgttcttgcctttttactgagtgttcactcgcttgtatgggttggtagcccgtttgtgtgtgaatattgaataaataaacgaatatcatcttagaaaactttatagggcgacagtaatattgggagtgtaaaaaaatctgttcccacgtcagctcattcaagatgttctttcatccacgtccacctacgtaataacatatttgcctttactctgtttaggtgattttggaggttactactgtccatgccatggttctcattatgacgcatccggcagaatccgcaaaggcccagctccattgaacttagaggttccaaagtacgctttcactgacccagacacggttcttgttgggtaaaagattcactccccagctttcttctatttaagcaaagctcatgt

SEQ ID NO: 9 - DNA, 9882 bp, Bemisia tabaci
  source 1..9882: mol_type = genomic DNA
cgctgtcaacattgaaacgactgaaattatcactccgttgtgtttcaatctatcaatttttaattttttatcactaactacttatttacacaatttcctccagtgcctgtgtctgcggttttagtgttaagcacaacgctgagcttcacattctacacacattaaaagagagctgtgctaatggtaatattccttatcattataccaaataccatgggttcgagatggaatgaccaacattcacctttaaatggtctttaatcctctgtcacattttcatttaataaatttttcatcgactttatcttatttgcatcatctcttgattagaaggatcatgataaatttccgcaatgaggttattactctccctcattgcacatagtgacccgagtttgacggtcccgaaacaacagttacctggagctggtttgattcgggactgaaggaggatgggcttttagggactctaagcgtgagataatctcttcaggaatgtttgaaatgaaaaaaaaatataggtgaactgataagtggcttctgcccttctgtaatgttcatcttacttagacatggtttttccagccctcattcataatccttcttttgcactgcatctcttattgccattaaatttgctagtttattccgattggatgtctactaacttgtgatcaattgcctctcatggttttaagcttaataggtacattttctgaagcaagatgaacacgtttttcagtagcgataggattttagaaagctaggacctttttaattaagatgacactataacggaaactgaattatcataactatgctggaccatggcattcatgctattaaaatggtgtctctcactgaaatatctctgatcttattttgtcggacactgattgaagatgcgtgtaaactgctttggaatagacggactaacgtaccctaagtaaaaggaaaatccagcaaaattgttttatttttacttttggaatgtaactatttctgggtatcaatgataatgatttttttctctctttttttaattaaacctttcgctagtacttgctgtaaaaatgagagactttttgaatttctgatcgttcctcaaattgcttttcttttttcccatccacagagaacaaacctcaagatctagttttacaattgacatgtagtctctgttaacattttatcagagcagcccttcttcaatttggaaatggacccagcgaaaagtagaacgtttgagtatcctgatttttggactgatgccgagcgaatgaacgcattgtatgctccttttcggaatcgcaatgtcaaccctctcaactttgacacaaaactggacttttggaagaagatgatcgaaaaatggtgtttatttcagtcaaacccactcttcagtatcaaagatatccaaaccttcttccaacgggacacacggagacccctctgtttggcgcttgttgtagatgacttgttgaagtaagttacagcatatatttttctcatcacttaattttgggtaaagtagagtgaaaccatgtgcctgcttctttgtcttaatttgaggagcgatagtgtagtcagaaaataggatatttatgcaatgcattctgtgattgatgcataagtaagaagctgcgtaagtggagaagtccattggccaaaagaggaacattggaataaactccaatgttgaaaaaaactgaggaaaaaacttcggtcatatgaatcgaatttacagtgttcgatatcggtcgtattgttcagttcatgcaaccgctctctcggttctgggaaccatatccttggttcgtgcaaccaaactttttcatcatttctgttcgaattgatagctcggtttgcaacaatacggccgatattgaacaccgtacattcggttcatacaacggaacttttttctctgaggtggatttctggaaaacctatccatatctatatctcaccaaaacattgtaaatttaaagttggggtattaaaataccaataaaattaatttaagctaggggtttacagatttacatgaaatttgtgatctatcctttaagaggccatgcttaaattatgtaaatttatgaaatccacaacttcagaccctttcattcctttcatcatccaagactgcttcccctttcccccgtaaagttaggtcatgttttgctggacttgccttatttttagatacgtaaacaatcgtcattttctttttcaatacatctttgaaaacaataacataaatttaaaaaaatcaaggtgattctttccccagtctcacttgaatcatgcaaatttctgcccttgcagcattttttatggacaactcctaagtttatatcaagtatggcggcgattggtgaattttgcaagtgaaaaaggttttcaagttttgaaatatcatcagagtataaccaacttgacctgtgaattttactcttacttaccttgttcccatttcgtttttttacaccattctaggaataaagaaataaagtcggtagatgaattcttgcaagagacacccccagaacaatcatggagtggttgggcggtgcattctttggtgaaaagtcctgcaagatgggcattcaccaagttaaaaactaatgtatttgcctccaattcaacagttcaggaagacactgagtttgtccatctgccatctttgaaggtaagcaagattgaaagtatccaattttcttttaattctctgtggctgttccatattgtttttgattgttatcaatctagaaataggtgtatcgcacatttcttttcatgtttacggttggtgaaataaagatcccttgtatctcagtcagtagcattgcaaccttttctttctttttcactgagtatgattatttcctcttttgttcctaggtgcttgctgaaaatatcctcaagtccgtcgaatttgatcatctctacgacatagaagagttgaaagatgtaatgaagaatgagcaaccattttctttgactattgtcaatttgatcgttcactacttatcactgcaggtagagtcaacatccacaaactaaaattttaattgtagggactgataaaggtatgcttcattaaaactttttgttgaacacagtggaaatattgggaatttccagaaccgtacaacatcgagatattaattctctggtgtcctcaaatttagctattatggttccaaaaaaatcaatttccataagttggggatacaccttcaaactactttacaatacatacataataatcgcttttacagcgctctctggccacagctggtcttaacgactttaaattttttgacgagtcaaaaacaaaaactcttcaggttcttgaagtagagtgtctactgagtcatttaagccaaaaagaaaaaaattctgtcgagctcctggaaaataaagtcgatttaaaggtatttttgggctaaaatagccaaattacccatagcaaggcccgtcatattatttaaaaaattgttttcttcctgggtataatgcccaagtttcttaaacatgcatattttaagcctccgattacctaaactaccaattttgaccatgtggtaaattttggggtcctaaaatgagccctcagagccaaaaattgcgtacattttcgaaaacttcggattttcggtttttttttttttttttttaacgttgttttttctacagtcctcaatgagtaattctgaagggcattttcgattacataattgacattttgactgttcaggtgaggggagggggggcatcaggctttgctttgccattctcacagtttttgaaaacgcttgaaagttccctattacattggaagttcaaaatatccctttttaattcattaattactgcttctgatattatgaaatatgcagcaggagttactgcccctcccctttctcctcactacgagatgcatggaaaccttgatcttactgcgcgcgctacgaaaacgcttgagagttccctaatacattggaagtccaaaatatccctttttaattcataaattactgcttctgatattatgaaatatgcagcaggagttactgcccccccctcctccccactacgagatgcatggaaaccttgatcttactgcgcgcgctaccggatccttgttttcgcgtgatggcagtccgttgtttagtagatccgggcatttgcaataaaacatttggcggtctttagcattacatataaatggacatgtttaagctgcaagtttatcctgcaaatgcccggatctactatacaacggactgccatcacgcgaaaagcaaggatccggtagcgcgcgcagtaagatcaaggtttccatgcatctcgtagtgaggagaaaggggaggggcagtaactcctgctgcatatttcataatatcagaagcagtaattaatgaattaaaaagggatattttgaacttccaatgtaatagggaactttcaagcgttttcaaaaactgtgagaatggcaaagcaaagcctgatgccccccctcccctcacctgaacagtcaaaatgtcaattatgtaatcgaaaatgcccttcagaattactcattgacgactgtagaaaaaacaacgttaaaaaaaaaaaaaaaaaaactgaaaatccgaagttttcgaaaatgtacgcaatttttggctctgagggctcattttaggaccccaaaatttaccacatggtcaaaattggtagtttaagtaatcggaggcttaaaatatgcatgtttaagaaacttgggcattatacccaggaagaaaacaattttttaaataatatgacgggccttgctatgggtaatttggctattttagcccaaaaatacctttaaatcgactttattttccaggagctcgacagaatttttttctttttggcttaaatgactcagtagacactctacttcaagaacctgaagagtttttgcttgtgactcgtcaaaaaatttaaagtcgttaagaccagctgtgtggcgcttcatgatgcctaaccaccacagtcctcgatcctcccacaacccctcagggagttggcactccctcatttcaattaaaaccccctgtggccgccctttcattgggcatcccttttgtctcctctgaggagaaacccaaatccaatccaatcaagtagctcctttgcagcctctcgtccgtcatcctgttaacatggctgtaccagacgagccgttgggtaaccttgactatgatgtcattttcgactttataataattttggactttcaatcagaaagtggaggttttgtttgaagttcggagaaagttagcgatttcaaacattttggggttcagaaatgcagaataagtcagggaacctaataaaggagatacataggaatcctgaaggttctcaatttttaagactgtaaggctacattctatcaagaaaatagcgtatctctcccagcagttaagacacaattatatcattttgtttgaaaatacttgcgcatttgctgattacaattaagtatttccaaaaaaatttgtcaactttcgtcattgtctaactacagtcatcgtgtatgaatcactggatgaatttttgtttggtggtcacgttctgttctattctttctgacattttttacttctcttttgtttcagagtaaagcaataaaaaccgttttagatggcaaaactctagtcaaatttgtaagtgacaaaggtggccagagcttgactatttcaaaggaggaggaggcaacatacaccctgcaatctcaagaacgcttcctaatagagaatattgaacagcttgagatggaaaaagaaaatttagtgaaagaagctaaaagttaccttgatagaggtttaagaaaattagtaagttcaatttaactgttctgttggtcattattagtttttgtataggtgccgtgctctggaattcagtctaaaagtgtaattatcattgcatagggtaaaaactcacaggagcaaaattttctgtaaaatccgttagtgtttacaagaggatacaacatttctcaaggcttgaaaatgtactgttacggaccatcagtgactcaaataattcttgtccctaataatagaccactaggcaaggtctagactagaaattaatggcacatagattttcttcaaaatcttacatagaaaacgaatcacgcaacgggaatttcggaaatcaactcctgaagagatattagcaaatatttttaacacagatcaaatgaaagttagattctttaaatgagtcatttttctttttgtcaatcaaccattgttgttaattataaatacttgtagcttgttttggagttaaagtttagaactccttttgcaggattcgtttttgttgtgaaatttcgaagaaaaaacatcttgcatagtgtcttaattcgtacttgccaagagcctcattgtgaatcaagttacttgtataatcatcatcatcaaagaagcctaaaaaaaaaaaaaaaaattcgaagtagggtagtgaaaaagtatttccaataatttttctttctcttcagattaaagtattaatcacccgacttccaaaatattatttctacacgcaatcaattcagccttttaattcctcttattttttgctgaaacaacctacgcaataattcttgaaaagtttcggtacaagtggctttttaactatttaaagaagcaaaaatcctttttgaattttcgccagcaggacgtaattttgatacttccaatttcacattgaggatatttaatacttgaacactgtcatttttgcaggctaaagtgcatctgagaaaaaaaatggagctagagaaaaccatcgagaaaagagtattaatactggaaaatattcaaagcttgatgagcagagtgaaagaagtagattctaacagtcaggtaagattgttaataaaaattattgttcagatcaattttctttcctcaagaaaaagaagaagatggactctgtgacattttggaaagaggttgatggtgcaggtgagtacaacagtgatgccatgtctaggaattttccggaatttctagggatcaagggattgtttttgacgaggtgaaagtaagcgaatacaactttctaacctcaatcatagctaaaatatttttttatctatattttgtaagccttattggcaacactattttccctgtaaataagccggaacagaatcgattgcgttactcgatatacttgacattccacagtaaaaaaaaaaaaaaaaaaaaattaattgaaactcaactaatattttttcattttattggtctgttttagcactgcttggcactgctttcgaagagcggcaaaattcaaatgagcctatcagatttctatattgtaaatctgtacatatatcgaatgacgttatggttctgcgtcaaaaatggcggtttttttgcaaaatctagagattttttggggatgtttgagcaaatctggggatttagggatttaatatcggatcactggggtacaaacatttttgtcaaagattttctcaaaagtagtgtagtttacggaaaagagtcataattcatgaagtgttcagaattatattttgtgttaaaacacgccacaacaatggattttatggtcagtccctgatactttaaattccagactttgcaagaatattgacaccagattggacccacctacgtgaaagtatgaataaattgaaaactgccatccccttatcttttttctttaaaatttttttttttttcttgttccggagctattaatttggaaaatgtggatgtttttttgacgagtttctataaagtaagagctgctagagctcctcatgattttgctgcctgcatgtgttcaatgttgcattttatctgtaactgctactcctatgtcacttacggagcattttatcgggttaatttcaggtgttcgatacttaccagcaaggcgtcttcgcgttggaatccaaaattaaagaagctggtctcaacatcgataaaattgacgatacaatgggcaaaattgaacaggtaatagcagttattttttctctcacttaatattatgctgcaaccgcaaatgttattaagtgctatttttttccgtttttgaaagtgttgtttaaaaaaatgcttaagttttaagaacacattgcaatggaatagcacaatttatagggaaattgtgtgtcctagttcgtattgagcagtagccgcaagctcagcattacaagacccacactttcagcgatcttggacagcaccgtccgaaataatgttatatttttttcatcggatagtctccttgctaatgataatacttttgctcgtcatattacggttgtgaagcagtgatttgttagctatttacattagttgttctcattgtcaaagtttaagttccttaaaaccaattacaattcttgttcacaggctctagaagacaatgacgaaatcgagtctacactgtctaaagtcataaactcgccgtcagatgctgaatatgaggctgaattagcggctcttttgctagatgaattagcgccagttcctgatcatagtccaacccatctaccatcttctctaataggtaattatattaattttagccttccgttactcctcagattgtctgtctcttaatgccatgttagcctttagataattttttgtaggtatccatattcttctgttactattaaaaacactctgaacttataaaaaattgtcctacaatgggcgtcaaaaaaatcctagataaatatctgatagtgatagaagtgaaaattgttctaaatcgcgaggttgaaaccaaattgtggatgcctcgaaaattgacttcggaggctgataaagctctctcatccctctctcctttgattggtggtttttgcctatcgcgaaaccatattgttttggcatacatccattcctggattgaaatgctaatagttgctacccattttacccctttctagagacgcagtgcgttcaaataatgtaataatactttagtgagcatatcgcgttgacctttttgcataaaccaaacctgctacagaaaaaagcaaaagcctggaacaaattgcaccctgctttctgatgaaaatagaagtgaaagatttttcctagttgttctctaaatcagttcttttgtttgtctcaaaggaaatcaagttgaggatatgggcacatcagaggtagcacacaagccgaaaaaagttgcagctgaagcaactggatgatatttgcgagagtcatcgttcaatgaggattcaagatctttttcatcacttaaaataattaattctcatcatatttttagaatgaaaatgacaagcaaaaatcatgccacaaaattagttccgtatgtattctgaccacttcattttttgtgtatgccactatgtttgacctgaaagaggtctctttggaatatacaaaggtgttcacagggctaggaaagtctagaaaattgaaggcattatactgtattaaagaataatcaggaaattttataggaatgacaaattgtttctccatgtttctaatacttttgcttatagtttttacgacactagaaacaaaaattttatttattatcaagaatacttaattataagcgtatttttactcctatgtgcatgaacctaaaaactgtgaatgatttgtggtcaaaatttctccattattaatgaatcttagcagattcttgactgagagggtcagggaatcttgattatcttggtcagggttacctgaattttcaggaattatcctttctcagtgcacagaaactgtgtgctgttattttttcagaatatgtactgccaccttaaagccaaacattggagttagaatgagc

SEQ ID NO: 10 - DNA, 37196 bp, Bemisia tabaci
  source 1..37196: mol_type = genomic DNA
ctggattggtgcgttcctacgagagggaggatcccccggtgtagcggccccaatctccaggcgggagagatctgaggtggacttcgacaactcagaaatgatcagttcgtagggagccctcggctgaagtgctaacgtttacctgtcaagtgaagtgctaagtttcacgtgtttttacgtcgttgtttttggatcgttgaccttgtgctctgttttcttctgattattcttggtccccgggttgatgttcgacaactcgtaagaagactcatcgttacccgcggctgtgcctacctttcgtgatcggttacccctgatatggtagttgttctgtaagtttccgtccatttatttagtcattacaggtactttcctacttcgtttcaatcgttagacgacttgacacgaatccggggagggttaaaattaaaaagataaactctttgtctagattgaaagaaagtaggtagccccagatcagatgtataacaaaagtagatggacagggccggatttacatttttagcgccctaggctaaacctagggtggcgcccctaaaagtaggcgctctcgtggggggcgggggggtggtcccccagacgcccctcccctccagatcagaagaaggatgttaggagtccggaaaatgttcaaattcacctttaaaaaaacacctttgtcaaccacaatttgtagaatctgtgtcccaaaataccatagacttacggccggctgtaagatttccaatagcttctatagccggcaacacgatttcttatagcctttcatagtcgatggcgactaagcaacagtctggcgataaagtgtatgctaaacgttactaattacggatgctaggacttagtgagtttttggactaccgctctcttttttggccgtagtatcttgatttattttgcgaggaaagctccgtacttttgaaggatgcctgccattcctaacatgttggagcgcctgcaattttgtatgatactgttcaatacctctggtgtgaaatagttgcttcaagcgccgtggtacgctgcggcgcggcgcggcgcacttcacgcattgcgcaatgcgtgaagtatccctgttaggtttgaaggcgccagtgcgccgccgcttcgctttgtgttaggctctaatatttaagctcgtggagtcaacgttttccaactcataactttgaaatgtttgcacactctgtatggattattctcattttaattgatgaaaaaaaatatgtagtaaaggaaaatataatgtgtgttttgtgaatattaaggtgattccgtacaaacttaaggatttacaaagcacacgaatttctacacaatttcttatagccttctataatcgatggcgaaaaagcaacagccaggcgattaagtgtaaagcccgactataggaactatagcccgcctgtatatttttttatcgcttcgtatagcccggccgtatgattttctccgcatcctacagccagatatatgattttctgttgccttctttagccggctataagaattcctatggtattttgaaacgcagctcttatctccaatttttaccagggttttgaatacattctcaaaaattttgcgcccctcaaaatgttgcgccctaggctatagcctatgtagcctattggtaaatccggccctgtggatggaagctgacgatgacataaattatctcggcataatacaccaaagattccatagagaagtttcttaactttttgccagaatagttctaggtgtttacgtgaaagtgaaaactgttgcgtttagacgtccttaaagatactgaattataaaatcgagcaaaagcgggcgctgtgcacgacagtcgctttttcaccattgatgtactttttttttctgtttttccctgattattttcacgattcttaccatggctggtccaatgcgggcccctttaagttgattttacctctttggcacaatagcaataacaggctagtgcaacacaataattataacagcgctaatgctgcttcagtgctaataacacaataattataacagcaacgcatttcttttcttaatcactcaaccatttatatcagcttttctaagtatattacaatatatattaatatgcgagaaaatttgcatattagattatggtcatgcaagaaagaaagaaagtagtagtagtaaaataattttattttaaagcggtgctttagcacctaaggccatttacacctctaaagaaggcagtataatagtaataaatttacatggaaaaagaaagaaagaaagaaaacacaacagttgccatactggacaattcatcattttgaactttaaccggcggccattttggaaatttcggttttttttttttaaaatctaacgtcaaattcgtttttctcgtgtcaaaataccccttcaaaccgattttcgcgcaaatccatcgacaaataaccggtgtgaattttcggccattttgaactttaaccggccgccattttgaaacggtttgagatattgacttcgggtttgcgcgaaaagttttctttttttatgctctttcgaacgagctatcacaaagggggtcttcccatttgaaaattaaaagttgggggtcgttgcccccccagggggggccaaaaagtagctccctttgacctaggaatatcccccaagtttcaaatctttacctcaattaggtaaaaagttagagggggtggaagggacttttggatcatcctgtataacactgcgtttggtgtagatacagcgatgtttgagagttcgtttaacgagaccgtacggacatcatacaattaatcagctgataactgtacatgtaaaaagcatacaaggtgttagtaaagcccccccccccccatctaggtgtttatctaatgggataatttgcacacaaaaatgttattgcttcatctgaaagtatgcttagcaggttgtttccgcagtatttttcatattttttttttttctgaaatgggaaattggaggaaaatagatttaaaattgagaaaatgtgccgccttgtgacgctatctagcggctttttccatttaaatgcatgtgtttcggcaaattaggttattctgtcatatttcctcctataactactgttcaatttacaaaccaaggatatcctcgagctcagttttgttagctgtttcattttaaacatggaatttaaaaaatttcagacacttgtaaattctctcattgaggtagagatttgaaacttggaggatgttcgtaggtcaacggggtttcttttcgacccccctaacatttttaggggtcccccttggggagggaggggggtaacggacaacgaaccccaaatttttattttcaaattggaagacccctcttgtgatacctcgttcgaaagaggaggaaaaaagctaacttttcgcgcaaaatcgaagtcaatatctcaaactttttcaaaatggcggccggttaattgtcaagatggtcgaaaattgacacctaggtttttttgtcgatggatttgcctaaaactcggtgctgaagggtactttaacaggagaaaagcgagtttgacgttagatttaaaaaaataaaaaataaaaaaaaaaaaaaaaaaaaaaaaaaacccaaaattgtcaatatggccgattttttttttttttatttggaatctaatttctttgttaatctcatgcccaaatacccatgggttccaagtttcaggcaaatccatacgcaaacaaccgagatgccaattttcggccatgttgaactttaaccggctgccattttaaaaaattttggttttttgaaaatctaacgtcaaattctgtcttgaatatcgtctttggattgcagcagcgaatgtttttaattcgaaaactggcctacagtagaggtgtttaaaagactcattcttaataggtctcctccgaggagtaaggctaaaacggtacattaagtgatgataattgcgatggatgataattgtttggttaggcagcttgagcggtgaatggcacggcggagggtgaagggtgagagcggtgaaatatgcggctgactcggcttattcttattctgttttgcatccgcactcgtgcgaacaaagaacgacaccaattttgctctcgtttacataaattaggtgtaaatcagatgagcgaaaattaaaaagcgtgttgcagaacaaacgactcgagcgcttcagaaagagcacaataggtggggtacaaataatttagtgtcagtcggctgatttatgcccggtagcgaaatctttttttgttattgtaatcatgcatgataatcgttgtggatgattttaaaatgctgctgagtgtgctggcacgtggcgcgtaactgtaacgtaggtattttgaatcgttaatataatcaagtatttctaggtttgatgactcaactttttgcgaattcgagtattcgcgactcaaagaaaggaatcggggcaaaagagccttttttggaaaatttactattttcaatgaatgtgaaacccccagaaaatgtagtaagacaaatgctcgagacgaaggaaaaatagaatagtgaacacaggtttatcaagcgtgtccttaactttgaagacaaaatatctaaatcccagacaacctgccgagtagtgcttccgagcggttccggcgcgtcgcaccaaaattcaaattaagaggtggattagttttagcatacctactctagttttagccggtcggctcctcttttttactcatcctgatgtattcagaataaatagagccaaaccggcactatacctagtacccgtttgtttcgtggtagaacagcaaaacagcaacagcaaatcaggaactgcgtctttcaataatttttccagtttcacctagctcttccaaatgtcttccaaatttttcttgtgcagttttgttgctaagcaaaatgtctcgagcaaaatctgggtgttttcttgtaaactttaaaaccacccagtgcgacttaaataaaaaaaataaaaaaaaaataaaagtaaagaaaaataaaaatgagcgtgtaaccataaaataaacctatacggtatattcgaatatgtgtatgaaatgaaaacagcaaaaacaaacagaaaacacaaaattgccaattttcattgaaagagaaatgataaatccgacaaaactgcacagttcaattcaagaattcagatggttccaggcttcaaaattgtgaggaactttagatatttttgtgataatttatgtctagttcctgttacagtttttcgtgcggtttttccgtgtatttgtaaacgaaaaaatcattttgtgcttcgcgtaaaagcaatgagaaaaacctctctgtgcgagggaacttaccaaacaccatgcggaaaccttctcagtatgtcaactgtacggtatatcaaaggaatgaactcgtttggtgtgagaaaaaaacgcactaataaaaaccctcgaataggttgactcatcattttcatccaggtatatggcatcaaaagcatggaaaagaagtgatgtatgtatatagttttcgaatagataggtaacttttatacgtgccttggttgttttgttgccgaccagataaaatttaaggcgaatctcaagtcataactttgaacagatccgcaccaacacaattaaagcaaatgaaataggacgataaatgcacacttttcgcaggggcaggtaggcgactattcgtgcttttgggctagtttgttgcctgtccagaaggattgaaggaaacttacgacgacgctaaaagcgttaaatctgaatttattagtacttgaccgagtagtttcttcatgtgctggcattataacgtttagattccataggtaattcctttaatatttggttgggaatcctcaagtgcaatcactaatcacctatgttcaaacgcacacggtggtgaatttttttgctccgaaatgaaccaaaaatttaagttcagtctgaattattcaaatacgaccactccgattcaataaggaacgcctcgtcttagtagataaaatcttcgcgtctgactgtgacatattcataggtacatggattcaaattgtgttttttttttaaattttaaacaatgtattggaatttattcactttatttcgacaaaagatacggccatttcaaagtaaaaggatcatgtaaatggtgtaatttgatgttaacaaacaaaaaattactcctctttcaattgaacattaacattgttcctttcatgagcatgcccctagtgtaaatattaccttgcggtgagctaaccatcaccttgcggcaaggtatcggccttgccgccctctccgagccctcaccgagctagttcatggaactcgacgaccgggaataaaactgtatgacaaccctgtagacccaaatccagacgcagggcgcgacaaaggcgacacagcatcgggaaataccccgtgttgggtacgatttttgtctccaacgttgccatgcataattattcccagtcgttaagttccacgaactgacccggcgaggcctcggatagggctcggagagggtcgcaaggccgataccttgccgcaaggtgatggtgagctcaccgcaaggtaatattttctctaggggcatactccaacattttttggatgtcccgattctagtcttcacatttcaaatagctgtcgaaggacaaattttaaaactttttggcctctccttgcggagaatgacgcagaatcaattttcttaaggctaatcgtttcattctttccattcactaaaagggaaatttttcccctctgcgcgtcaccacagtgggttttaactaaatctaattaagaaaatgaaagtccccatgtctgaaagcggaaaagaacagcgaaacacctcaggaaaacatccctgctgaaaagaaaatcattcgttgggccgttttttttttttgccccccccaagccaaaaggcggccgatatgcgccgccgcggggtgcaaatgttacaactccctcacaatgtcaagtggcacatcgattcctacgtaattttgattgtagaatccgaatatgaggtcagaaatccctcacaaccaaaagggatcgcgcaaattcaagatggcggccaaaaataggccccggagtaaaaattctcaattccagcttttggtgacgagtgagatgtctttttttatgttttttgggtcatgggatccaaatttgaggtcaaaaattcccttctgccgacagggatccctcaaattcaaaatggcttccattttggggctgacatattatttccgaaagacgcgtgtagtcgagtgaggtgtctttttacatgttttttggaccacatgatcagaaactgggatccaaactgtgtccctgtgggccggaaggtaagatttgtcccttagcaccttgattgtaacgtttttatcaactatttaaataaaaactcagaatttcactgttagaacggcgccaaccacaccaagaatgctctattcttacaaataatgtttgacctttttgtctagcaggggctatagtcccctgcttcacaaaaaaactagcgcaagagaaataggaacaaaacaaaaataatcttctttgaacagtgaaacagtgaaaacagtgaaattctgagtttttatttaaatagttgataaaaacgttacaatcaaggtgctaagggacaaatcttactttccggcccacagggacacagtttggctcccagtttctgatcatatggtccaaaaacatgtaaaaagacacctcactcgactacacgcgtctttcggaaataatatgtcagccccaaaatggaagccattttgaatttgagggatccctgtcggcagaagggaatttttgacctcaactttggatcccatgacccaaaaaacataaaaaaagacatctcactcgtcacccaaagctggaattgagaatttttactccggggcctatttttggccgccatcttgaatttgcgcgatcccttttggttgtgagggatttctaacctcatattcggattctacgatcaaaattacataggaatcgatgtgtcacttgacattgtgagggagttgtaacatttgcaccctgcggcagcgcatatcggccgccattttggcttgggggggcaaaaaaaaaaacggcccaacgaatgattttcttttcagcggggatgttttcctgaggtgtttcgctgttcttttccgctttcagacatggggactttcattttcttaattagatttagttaaaacccactgtgtcacagtatttaacgaaaccataggtatcatcaaagcaccgtgatgcacgaattgtccaagtatcatttcggcgggcagtccaccatgatgccacagttggcgtggttgatggatattaacgaggactccagacttaactgagacctagagtataatgttaaggattatagcacgatacaatttcaaattatgagcgcatatacctctcttcggtttcggtatcggcacttgagtcggcgcaaagagagcaacccctttcaattagagcggctctttgacagcacgaaaaaggaggggaccttactcacgactgttttcacggtcagttaattcggagatgcgtccgactgcgactgctgcaaaggagcccccctcccccgggcgggagcccccagtagccgtggacgcgtcgccggactaatttgaattaataaataggtattgagtaatttagtaacagagtcgggcgtcgccgtgatgaatctaattaagtcaaatagtatgcactcgaagatcgggagctgcgcggagagttgcgcccgggatgctccgcacaccccatcggaattataccccaaccccccccccttccccttcgcggcacgacgcgggccaatacggagcgcccgtcaatttagtccccagctcccgggattttctaattggtgagcccccaatcggaattgaaattacttagttgagtgcgttgcgccgccagtaccgagtgattatacttccagttttcactcatagcgatgagccaggcttctcgggaccttgcgtgttccttcgtctggtccctcccccgcgcccgccggagagtgtgacccggccccattcggacttttggacgggacgttgatttatcgatttaaacaatcttttgattgtaactctcactttaaccccgtctctgcaatcacaatagaagctcaaaatagagcgactgcaatatggagacctggccgatcaaaatgttaaactcccgttttgatcgtgactatcgttaaaaaagttaaaatgaacgaagcataagtctgtgcccaaagaggagaacacaaatatctcttaagcaattcctgcatgaaattcgccagcaagaaaacttgatttcattaggccttgtctccacgggatgtttcacgagatttgtccctgggaaaaattccactgacgaagttgggaaaaatattgagttaatcaatatttttcccagtaccaagtatggtccctgtacccctaggacccactgaggggggaagaagaagtgaaaacgaactgtgcgatattttattgattactccattgttaatatttgtttagttagtttagttaaaataatgagtctaattgtcaatggagtgcaattattattttaatcccggttaaatactctaactaatttacctatatcctcccgcgcaaactagtcgaaggactgtatgagccccttcccgtggagacggtaacggggaaaaatcgcagaagtttcattcctgcgattcgaacttgggacaaatctcatgaaaacgtcccgtagagacaaggcctgtacctatagagaatcgtgttatgtgcgggatacgtcgttgatccggaggatatggattcgatcgacaagaaatgatctaaaaatgaaaacgtcaatcgatcgacgtgagcggattgatactgattcaattaacaaaatatcaaaaaaaactgtgtcgattcgatcgagatgagacaatcggcaaatacaaacttgaaccgatcgaacgtgattcgatcggcaaccgtgaagcgatcgaatcttgttgatcaaatcacgttgatcggtacacgtttttatttttagaccgatattcatgtcgatcaaatcgacacgattttttaataatttgtcgattaaatcgatgtggatcggttcgcatcaattgattcatgtcgatcggatcaacggtcgatcggttttctaataatctgccaatcaaatcggcgtcgatcgattgacatttttatttttcggtcgactcatgtcgattgaatccatataccctccgttgattcgccctgtctaatcctgttttaatttactctgattgttttctggagaaccgactcatgcttcatcgggccccaaagcaaagagatttcctccaacatgaagtctgacacttaatagataatgtggattacattttgcaataaggaaccactatctatcactcttccataaaagcgcatatctacatagggaaacaaatgacatgtatgttgtttctgaaatgggccaaaaatagtggttccttattgcaaaatgtaatccatgtaatagccgtgagaggcgacaatgcagtacctaggactaactccatccatgaatgaactcgctcttgtgagtacatgcagttactacgtttttggatctaagagagatccacgcttttattttaattaattgcattgcaatcccatgattaggttttcatcttcaatccaaaaaatatatatttaaattcgaatcgaaaacaagaaaatgtggaatagttgatgcgtatgtttctttagggtggtccctatttttgacttttgagaaattgtaaggtcggaaccccgcagtcggttcctttttatgtaaaaataacgggaaaagaaagaaaaaaaaattaaaacattttttacccatgtcgcaatggcgccaaacttgaggtccgcgaaaatacggttttcagcaaatcgggcttttacggtatttcgctctgaactttgggcacgcgttattgcatgtagacgaataaaaatttgcactaatatacatttgtttatgttctttcacgtaaaatcatcaaatttgggctaaaaactgtggcaatgcatgttttaaacccccacagttacggaaaaacacgatttttcgggccctggtcaggagtcacgttttataggcagtgtctgctaaaacgtgatgattaaggtgtccttataaaagttcgaccctcaaaaagttacgttttctggttgaaaaagtgttccatttggttagaaaacacttttggccaagtttcagatttatgggttaaagtgctgccgcatcgcacatttttgataaatttgcaatcccgatgattgagatttttgacgatttgataatttttttattgacgaagcagttacgatagagcctcgaaaatttgaaacagtagcctcctaacactctgcttttgaaataaattaaacattttggcgtgcgagacacgagagtattttttaaaaattcggaaacttggctgaaaacactcttctggcgcagatgggtaattagcgagttgactaattttttaaagattgaaagaatattctatcgtcgtgaaactttaaggtagttgacttctaatagactatttttgataaaaattacacatttaagcgcgcagaccgcggaagtattttttaaaaattcggaaacttgaccgaaaacgctgtattgccgcatatttaatatgcatttctgtgaaaatggatttcttttttaattttcggagaaatatttctggcgtcgtacgaaccgaagatagtcaacctataatagcattagttttgacaaaaaataattgttttggtcccagagacagaaaattcacgcgttgttaagggatattatctgatgagaataattacgtaacgcacacagcaagcaaatgttggaatctgaatgatctatccctgggacctaaactattatttttggtccgaaccatgctgggtttgaaacatgcatttgcacagtttttagccctttgatgattttacgtgaaagagcactaaaaaatgttaactggtgcaaatttttattcgtctaaatgcaataatgcatgcccaaagttcagggcgaaataccgtaaaagcccgatttgctgaaaatcatattttcacgggcctcaactttggcgccattgcgcgcgacatgggtaaagtgctctcctcgctatatgacgcgtaacccttcaatttttagtttagtccaaagacctcataaggaacttaaattaatgaaccaggtggtgcacttatgccaactttcgaagaattaaaggcattttttttttaaatttacagtccttgaaaatgagctgtttgtgtcatgtcgcggagcaaagtgccctacttttaggcctcgttatcccttcagttttgagtttagtccaaagatcttttaggaactcaaattaatgacccaggtgatgtgcttgatgcccacttttaaagaattaaaggcatttttcaaaatttacagtccctcaaaatgagctttccgtgttattttgctgaaaatggacctttaacccaatttgaccctagcccccccccccaaattttagcgtaccccaaaattgtttgacgtgcataaggagatcatagatatggtgttctgtgagaattttgaatgaaatcgaacagatagattctgagatatcgcttaacacagatttgggggacatcggacggacggacacttattttttcaagaatagttattttgactcctgggaccttaaaacgtccagaaatgatgaaatttcaactttttttttcccccttagcggatgacaatacttcctctctaccctagggtagcgagaaagtaataattttatttcttttttcccccgttatttccacctaaaaaggaaccgattgcagggttccgaccttagaatatcgcagaagtcaaaaataaggattaggtacccttaattgttgtttcttgtgatagtcggaaattgtgatcggatgtgtgcaattgttcttctttccttttttgctgtttagttgggggttatttcaccgaagagtagaagtgtaaataggtaaaaaaaatggctattgctgtttaggcatcgctctatggcttttgtatgttggagttttttggccgacgtgcgttaacaaagaggtgtgtgaaaaaacggccaaaaatgcctcaaggcatttttgaattttgatcacttggggtgatacagtagcttcccagacgcccaaaaccggtcgctgttttgcttagaagcgccgggttgcgacgttgccattttttaaagtggaaacctttaaaaattcatatctccgccgcatctcaaccgatttcaattaactttttttgaaaatgttccttttaaatagagcttcctattaatgtatagtttcctgggtttactcggctttaagtggcacttacgcggttttagcacttcttgatagacacaaaaatgtagtttttattttaccacgatcgtggaatcgacgaaatctaaacaaaaaccagtctaaatgaaagttcagattctcacctttctaacgagcacaagatcatcccggggaaacgtttagtttccgagatatgaccgctcaaagttggtcacatgcgcttttgcgcaatgtgaatgcggcttatcactaagtcattcgcgaactgggggtcccttatgttcaatttacgttgaaataattacacagagcagtaaggtgtacaacacgagccgtattttcaccttcggctgctgatgtgcgacgttgccatttttttaagtgaaaactcttaaaaatgcataactccgctgcatttcaaccgatttcaatgaactttttttttaaaatgttcctcttaaatagagctctctaacggtatttaggtctctggattttattgacttcagggcggcacttaggtcgtttatatggttttttgcagagatttttcatataaataattgagttgctatttttttcttctttttttcggaagggggtctgtatttcccccgattttttttaacattcaaactagatcggaagatcaccatcgcttaaaatataatgcaaaaatcttggtaaattaacaacaccaacttcccttgtacaatgagagcgtcgctttcaatatttgtacacgtaagaatagtgattaaaagaatcccttttttcaaagttcttccttttaaattttgccatttcaaaccctcccacaacccgcggaaaaaaaaaataaaaaataaaaaatagcaacactattttctatatgaaaaatctctgcaaagaaccatataaacaacctaagtgccgccttgaggtcaataaaatccaaagacctaaataccgttagagagctctatttaagaggaacattttaaaaaaaaagttcattgaaatcggttgaaatgcagcggagttatgcatttttaagagttttcacttaaaaaaatggcaacgtcgcacatcagcagccgaaggtgaaaatacggctcgtgttgtacaccttactgctctgtgtaattatttcaacgtaaattgaacataagggacccccagttcgcgaatgacttagtgataagccgcattcacattgcgcaaaagcgcatgtgaccaactttgagcggtcatatctcggaaactaaacgtttccccgggatgatcttgtgctcgttagaaaggtgagaatctgaactttcatttagactggtttttgtttagatttcgtcgattccacgatcgtggtaaaataaaaactacatttttgtgtctatcaagaagtgctaaaaccgcgtaagtgccacttaaagccgagtaaacccaggaaactatacattaataggaagctctatttaaaaggaacattttcaaaaaaaattaattgaaatcggttgagatgcggcggagatatgaatttttaaaggtttccactttaaaaaatggcaacgtcgcaacccggcgcttctaagcaaaacagcgaccggttttgggcgtctgggaagctactgtatcaccccaagtgatcaaaattcgaaaatgccttgaggcatttttggccgttttttcacacacctctttcagcattaagctgataatctcgatacagagggaaaaagctcatatgagcaaaatgttctataaaatgtattgtgctgtccagtactaccacttatctacctgttgcattgttctactctaatataattcgaccttgatagtaagtcgccaaatctacctacctcttgaaaatcgtcgatttcttgtaaccagttattttaggagagctgattgttctatctgaaaagaaaatcgattaggtacatagatagaacagactcttggactcttcgaagaaaaagactagagtagacgtgtttgtccacgaaaccgccttggaggaagtattattttcactgaaaaaaagaaataggggttgttggataatttcggcatttccaattaatttcactaatttcagtaataccctaaaaattaggttacgaacctaaaccaacttccccaacttgagttgggcactaccataatttattgaaaatgctcatattatccatcaaattgggggtggtgccacaatttttggcgataacccttgacactttctttttccgtgtcctgccccaaacattgtacatacgaggtaaaaatggaagttaaactgactttttatgtctgaaaagtattgtatgactatatacatattgagtaagtgtggaatatttgaaaattatcgttttctaatcataaatattcagagaaatcgaagaaaaataagatatttcccgtctacaatttatatgcgtatgttaagtgtaattatattactgcatattaaaatgttaaggacagcctgactataatttttcatgttttgaccttttttcagaagggaagcgggagttcctgctgttcttagtgggacacctcctcattgcaaaactggaatccctcgacatactgattgggacataaatgactctactatcccaagggtaaggtgtgcctcgagtattggaactttacaaagctcttcacgtcttttttctgacagaatcttgcttcgaaatagccattttggctaacaatataagcatgacaaaatgtaagggacaaattacataaaaaaatatatgtaatatgcacattcattatgttaaattctgttttagaaataaaaatgacacgggcctgcaatgtataaggcttccggtgttacggcaccttgtataaaaataacattattctaatactactaccacgtacttaaacattactcattgtcggaactttgatataagcaatagaataatttgcttttattcctatgaaaaaaaagtaatttcttaaaagctcagaatgaatacaaactaggattgaacgtctgtcgacttatttcgacatgcaattaaaaatgagtaaattagagtaaatcggatatcgatctatcgatcgctcttggatatatcaattgatttcgatggaattggggcttgggcttaatctctttttgtttttgtgtttagtgaggcaaaaagaaaatgaagaggaaaaaggatatttgtttgatttgtgtgggatagagaggaattaatttgagggggcccgggtttttggtttgattgtgattcaggtggtggagtacaatgggtgggaggagtgggcggacggtcactgtcggctggtgtaccgggccaactgcgaagaagcgcggcggcatgcgtccggctgggccatgcgcaacaccaacaaccacaacgcgcagattctcaagaagtcctgcctgggcgttctcgtttgctcccgacgttgcgttctccccaacggagactccgttcacctaaggcctgccatctgcgacaaggcccgcaaaaaacaacaaggttcgtacataggaaaaatctctcttctctcacctactcaaaaaaaattaaaataagcataataaagcatccaccgtaagttaggggagaggcgggcaacgtggagagtataatttggcctttaaaaaaaatctgtcagtcctattgcgactctgttggttgaaattgaaactagagagggtacccatctactagaaactgtttctatgcaaaaaacaaaaacataaccaataaaaaatgacggcaaaaggaaaccggtcctctgcaaattttcacgcccatgaaaacctatggggccacgggcaaagtggaatgggcgggtacagtggaatatggtcattttaaaaaatgtattcatcctgtggtgcttgaaatcgaaactagagagggtacttatccattagaaactgtttttatgcaacgaatcacgtaagtaactagccggccctcgccagatttggcccgcgttcgtgagagcttattcgtatttagaagtgtcaaattaataaatccacgaatcttacctaatcagtaattgctctagtttcgatttcaaaaccaaaatctaactgaatcggctcctccttttaattattaatacaacatcaaggggcggtgtctcgaattccactttgcccgacttaagtcgggcaaagtggaatttggccttttttttgtatctaattttcttggcgctttttgaagacttttccggcttctttcaccgttttttgaaaaaaaaagcgatgagacttcaagtataaataaaagaaatcctactcatatgagaaaaaattctactcataagagtagaaaagttcaactcatatgaattcaatttttttcatttttcagaagtgccgtttctgaccaggagacgccgacaagggatgttaatttgaaaaataaaaactttttgttcttatggttttttgatgcggtgactagtttctgagatatcggacgcggtaaattcaacgctgaactcatgggagttgaaatctctattcatatgagttggaatctctccctagcgtaaatattaccttgcggtgagctaaccatcaccttgcggcaaggtatcggcctatccaccctcaccgagccctatccgagccctcgccgggtcagttcgtggaacttaacgactgggaataattatgcatggcaacgctggagacgaaaatcgtacccaacacggggtatttccctatgcaatgtcgcctttttcaagccctgcgtctggatttgggtctacagtgttgtcatacggttttaatcccggtcgtcgagttccttgaactggctcggcgagggctcggatagggctcggagaggatggataggccgataccttgccgcaaggtgatggttagctcaccgcaaggtaatatttacgctagggtagtcatagaagttggcgaaaactggaaagagaaattctgctcattggagttaaattctgctcataatagttaaattctgcttaagagttaaatactgctgagttaaattaaaagtgaaattccattcatatatatatatatatatatatgtgagtcgcttttatagcgctctttggcgctgtgcgacgcctaatcgccacaaagctcggtcttcccacaggtcatcagggagttgacaatctcttatctcatttaacaccccctgtcgccaacctctcactgggcgtcccctacgtacgcgtccattcatatgactttgcttatttctactccatttgtactcaccacttttggcagggatatacagtggcgtaactaccatacctgccgccaccgccgggcgggggggcgcagcgatacgaggggcgcaaaattttgggaaaagaaaacgggaaaaagaaggagaaaaagaaaaagaaagaaagaagaaagagggggagagagggggagagagagggggagagagagagagagagagaggcagaaaagatgaagaaagaggaaagcaaggagaagaggtacaacgagaaaaaaaaattgtgattatgcaaaaatttcatgcaagtttcacattttttcatacttttttgggacttgaatttcctcttcacttttctttctattctcattgcgataccttgattttctcccatttattcagatctgaatgactagaagggcagggggagaggggggagggtgcgctactcaaaacttctgatatgaaaaaggcgcagtctcagatcggcgggggcacgcgaagattgctagttacgcctctgagggataaccgggctaaaaatcaacaaaacttaaagtctcgacgttccagggtggtttaaccccctcctcgaccaggaaacaaagatatatatttatacaaaattataaaaatcaaaataccaagacccccattttgtgacaccaaaaagtgaggttatcacagaggctctataacagaggtatacgcacctcggtgccaagatcgacgacactcccaagtttgtgcatttttgtattgtaaaagcaaggattctttttttcgccgtgttggacttttcatctgccgaaatcctgctacgttaacccaacgtttcctgtcacatggacacagaaaataatgattgaaagcaaaaatcgtgctttcggagtcacaaatgagatataactatttgaacacctgagctgctcaacttgcatagtcatccatctgaaggagaattataactcaagcctgcattcttacgagttcatgaaagatcttgaaaaaagttatggatgattacccccttagaattagagtacctttatagacagagtatggccatttctgttccggtttttcattgctcgcgtgaaaaaaggctgacacgatgttcttacggccgtaaataaacaaacaagatgactgtcatcagcaagcaaatttgaggttatgcacatcttacatcctcctgtgatgagaatgaaaggcgatttaacaatgttttcatgtgtttcttatgtgttattcgtagatatgaaaatttaaattgttgctgcagtgtaattgaaatttttgtaaaattttaccttcctatcaatgtcacggtgagccgccatctggtttgtttatttacggccgtaagagcatcatgaagtccaaaaactcgttgaccaatcaaaaagcggaacagttttcctgtagtaaaaagatacgaatgaccatactctgtctataaaggtactctacttagaattatctgacttttcattaaatttcgtcaaaaattcaaagaaaaacactcgaggaaattgggtttacctatttggggagaaattccgtatcgtctgaatgttgatgcgggattttttctcagaacgggagcgtggcggtggtgtcctgatgctggtcgaagccccgtttcgaattacactggggcggcgcgcggcggttccactgcgtacgtcacggaactggatgcgcacaaagacccagcatgacgtggccgcgcgtcaccgaggtcccgaacccatcgctcacgtgatgttatggtgcgtctaggacgacgcggccgcggccgcggcacggcgcggcggatagttggagccgtgacttcattacatcgtccaacacgaagttatcagattcggcacttgatttccactcaatcggatctcagcccacgggtcgtgaagcgggtagagtagagcgagaggaatgtccattatttttcacttcctacaataatatgcattgcactcaatacccagtagagcagtgtactaggtgctatgcatgtgtgccaagaatgtcgcgtcgggtgagaggttgcccaaacaagttttggaccgggtgcatgccgtaaaccccccccccccccccccnggagatgggacgatatgtgatgggtacctcaaaggatcggcctttcaactcttttttcaagaatcgagttgccgaaagtttgcgtggtagtcgcatttgacgctatactggaaaaaagtcgattggatctagggtccagacacttaaaaatttgataaggaaagatactcttgattcgatcggatttttactggtttttactcggaatcaaaaggaaatccgctgaaattaagaagcttggatatctattcaaacaaaaatcctattgaatcaagagttttcttttcttgtcaaatgttttaatagtctcctttagatccaagcaactttttttccaattgacataggtgcctacctaccttagaagtaatctttgttctaggtgcctaaatttacttatttttttcgtatttttttttcctcaaccagggaagccttgcccgaatcgacaatgcactggtcgattagaaattttagcgtgtagaggtcattgcggatatccagtgacacatttttggaggcatactgaccatgcaatattttttcaggtagatatacacccaatttttttacagtctacgttagttttatttattatgggatgcctgtaatatttaattcgtgggcaggtcaagagatgtaggcaccaattcaggatcaatcaagttttaacgtgtaaattacaaaaatcacgtttcgaataagtatccagaataaaaaaaaccctaatcaatttctaccgtttagaaactcagaatgatcttgttctttttttaaaaaaaaaatatcaacgtcgaaacatttccccgagtgtacctaatattcatgaaacaaataatgcaccatcatgacggagcattgacgccctccccctctctcgtctttttacaaataggtaaaaaaaaagactattcaaggtaatatttttcgagtccaacgatttctccgtgtctctgctgtttgttgagaaatccctgaaaaatgaatcttttagccgcctaccatgttatgctcttcgtggaaaataggcacgtctcatcttccagtgcactagcatcttaacccgggatgctgagattcttacatggcatgcttggtccaatcaaaatcaatctggctcccgcgaaataatcagtactatgtattgaaaataatggtattttattacgaataaccctaattgcattcacttactcattactcattactctatttacgtcaatgattgcaccaactcaactttacactcgcatgtgagtccatgtgtttattccttcaagcaaatgtttattgaattttcttttctcttgccgacttgagaactttccactaggtgacataggaaaaaaatgaaaactagagttgtcgctttaacgcttcaacgattattactccccatattcaatactttgaagtcagtgcctgcatttcaatcctgatcggtcaaaaactgcatcaaagaagctcaatgttcattagatcttctggtgtggtcacctttttctgagtcatcgcaaaaaaaaaaaaaaaaaaaaaaaaaaaaaaaaaaaaaaaaaaanaaaaaaaaaaaaaaaaaaaaaaaaaaaaaaaaaaacaatggcaatgtttaaatcagaaatactgtacagctaaccccttactttcaaggttcttcccttgaaaagcgaaatttccgtttttattagatcatagtctcgatttttaatttgactaatttccgcttttttacttattcttttttcttattttgttttttaattaggcaaaaggtgtccatgatcatttgagacctgaagccaaatctacctcagaagctaggcggaccttgggagccggcagaagagttagaaatctagccgttctcctagctcgtgatgctgcacttagctcaaaagtaagtttagcatgcatcaaatcaatactgctgtgcacatttcaattgggtttattggacgtaacagttgagagtgtaatgtgaaaccggacgaaacagttgagagcacgtgtaatataaaattggacgtaatagttgagagtagagtacctgtatagggagagtagcgacagatcggtttatggagggcttagggcccaaaagtgcagccacccttctgagcaacttctaacacacaaaatactgccagcctacagatttcaattctaaccaagatggctaagaatgtacataaatgagcgttctttcgcaaaaataagtaaatttatgcaaaaagtaagccaattacatgctttctaaatgacggttcgtaacaattgtatttgtaaatcactctggacattcgaaattcataggttggctgcccttttgggccctaactttattcgcggaggcatcggcctgatggactttcggagtttcagatctgtcgctactctccctatacaggtactctagttgagagtgtaatgtaaaattggacgtaacagttgagagtgtaggcaatgtaaaatatacattatattgacaacattatgctgctggtacaagcttgaaaacaatcttgattgcaatgcgtcaccacattctgcttgcattatatttttaaaaaagaggaccagctgacatacaattttcacagaatcatgtcgaggtaggtagtgaaaaaagcacatcgtaagaaacgaaaaaggagcaatgttactcggaatttccaccaaaattaaatttggaattcgtattttcggactttcatttgggtgtctcttcattagtctatctcaggatgattttaagtttagaacttcaatgaattacttgaaaaaggcccttcaaacgcacgtacagggtgtcccagaccatccgtaccaggcatttttttcggttggtgtccgtcgtgcgaagtcgggaaccgcagggttaaatagggaatcgaccccaaggaatccgaatttcatggtcccggaccccccccccccgtctcccttggggggtaaagggttcccccgactttcgaaagtcgggagaaattgtgcctcccccgtatacccccataggaagactaggggggcttcgcagggtgcggcttattttcgtcatgtcggaaaattgacgaagtccgggtggcaatcggtgccatctttgaaaataattggctgtattaaatttaagccaatttgaagcttttttagctgatgctcaaagggatcaagactacggggcaaaatttcattgctttaaatgggcggaagaacgcttgatctgcgaaaatgcgttttttggatctaaaatgcgcttaaatgaagaaaaccagaccagctcttagagaggcatctagaagcccattcaaaacgaggaaattacacttttgacccatgggtgtgggtagggggggatcactcgagtgcaaagataaaatatatacacccatttcgttccaggctcgagaaatagtatagaaggcaacattgtaaagggcttagtatggttctccagggctaaaacaactattatatattatttctcatcaatttgtgaattacatttgcctctttaacttcgaaacacttattttgagttcgatcagaaaatcttaaaagcgatcactaaccggctacgccgtgaccccccctgtccccattcatgagtcaaaagtgtgattttctcgtttcgaatgggtcatgactaaatccataaagagggagtctactttcttacaactagaggcttttttcgaaagtagataggtatctgaaaaagagttcgacgcagcgacgcagcacgtaagcgcttgggatcattatggatcgggaaaaactggtgagaatatggtttatagaggaggaacgcgtgggcaatattgacggggatgaaagcgaaaaatctatatctataattaatgggtattacaacccgttcagtctgacgcgaatgcgttgaatgggccaaagtgacgcaaagaagaatcaaggatcctgtgacgcagcctgcatcctgaaattttttaaatgaatgggaaacggatgatggatttatgcggctcaagctaagattttaaaggaaagaaaggggggagtcatgacgagtggataagcactgttactcacttgaatagcgagagacaaatgtaaataaatcacgcgggaggaaggattgcgtccggcccattttcagataaggtgcctctccataaataacattgaccgaatcaaatccgagattcctgatatgttattaattaatcaattactatgctgcttaagcttatcccaataagaaaattatgggcttctctgcggttgtatacgttgagtccagtgcaaatgtatgaaaaacgaagcttcgcgggttttttttttaatttctcgcaatggagagttggcgggtgtctgaaatttgatgaatttcattttaaattcgcaaccagtgaattgagcacgtttctaaatcgatgagttcatcgaggagttacaacggaataatctgatctactgaaatacacgaatcggaaatgccacttcatgccgtcaaaagaacatttcctcactttgaattatatttctcctgatcacacccattttaaaacaagttataaagaacaccatgaactgagcttacaccttaaattcgaccaatgtgcacgcacctcaacttgttttcaaaacaaaatagatcaatgcatgaaaataatagatgctcatttcaatatgtttccgcttcaatattttgattttgtgaggataaaaatttaaatgcttatttgtagagataaacatattagttaaaaaatattaccgcgcgcattgcaaagatcaaattttcatgagagaaaaatgtagaattgcaaaaatgcgggataagtattcaacaaaaatgcttcatacattcttatacgagcgttaaagtctctgcgttaatgtacttggacagtagagataattaaatgttagaacgctgtttttcttttttatttttggcgaattttctatacttgttagtgatttatgtattcggtacttgagagcttgaaaaacagggacttgcccaatagtcgtcaataaatgaagaagaagaataattgaacaagtcataaatgcaattcaaaacgtttacgatgagacaaaattttgtcctgcaaatatgtcgaaccagacgaattggattgttcgatgatccaatattgtggaagtccaatttgtttttaagtgaaaacagtaaaaaaaattctggttttacttacctattctcgtgatctctgatgagttgttatgatttctatctagcggcaaaaattcataacggaacagttttaacttacttctttttcgaaagataatgctcatccaagtcactggttgatatgcaaagcgttgagaggaaaaaaaatctgttgtagtctctgcattgatcactgcggtgtgcaataataattatcatgtagctaccacgctagctgcattggaatcgtttctacgtgataaatacatatagatgtaatgaataggtttataatgcgatgatttattctccccctaaagattccgcgatgccctttttaatttagaggatgtgtgtaaatgacccaacgtgtgtgtgggcttaaggtccaggcgcgtcccctgagatggggagggggcgttcgataggagttcacgggccgggctattgtaataacttttcactgggaagtaataattacagatctagccactgttattatcatttcaactccttcggacttcgaagcgtctgcgcagctttctttgcttgaaagtgtcttcgactcgcttttacagatctcacaccggaattgtcggctttagttcaattgattcattcaaaattttcttcaacgtgtattttacaatagattttacaaccgtgcatctaattgatttttgtcttcattaacggtaactgtagcaggcatatgtcttacgaaaagaatcctcaagtatattattcccagccgttgccaattcttctctgtatatatactactaaaataactctcattgtgcctagctcctatcgaggggcaataggggcatggaagacaagtgggataagtacagttttgggaaaaaataagacattaatgatttcaactaaaactagtcttaaaatattttctgtgcaaaattcgctactaaaatccaaattataagcatcaaaaagaaagtctgaattttctatctgccataaggctccatgtaattttgaaactaaatgcacacgtatttctcaaaaaagcaaaaactgcacttatccgtcttgtcctccaagcccctccattttttattttttgagaatgacgcaactggcgtaacattgaaaagtggaccaaaatcgaagcatacttggtaattaatctagtgtctttttgtttcagttattatcagtcaaggatagagaccgtaatagatgtgagatagaacgtttgcgcattcctcagcctcccccggtttcggacagtgaaaaaggtgagtgagagcttacattttccccaaagttattctattgcaatgataaagataagtcgagtcaactgactcacagatcgagtcgaatgaaattactacttagaggctattaaggagaggcaatcagaggcattttcagattatgtaagaaccattaaaagtttttgccgttatatgggaatgtaggcatattccgcttgaaagtggagaaaaagttaacttgatctcaacttcaatacggggaaaaaatattattattttcaacaatgtgcctacactcaccaaagtgagaacttctcatatagacaacagtttttcttttttcaatgtaagttttattttgcctacgctaaccaatggaggtattttttcttcgaggcataataagaacaatcattctaatctactaattataatccctacatgctaattcctacctgaaatgtaattttggtccctctacctcataaatgtagcataattgcgtcgtttcccgaacgaaggaacgttactcttttagtgtattttcttcggaaaattcggaaaaacggggaaagttggccggtgtttaggacgatttttgtcattttttggggacctgaacaagaaaactggagactttgggggatatcggggacacccgtccaaaatcgggaataatcggggacattggggacttttggggatcggtagacaccctgattttatttagcttgctcttagatgatcgatacaattttgaaagtttcttattgaaaaaaagatacatttttcatctcgacatttattggatatttcatgacacaaaatgtcaaaggcatcttttaagttgaaattgttaagtagttagaaaattagaatccaattcatacaaatggaatgaagtaaagtaatttagggaagtaaaaaacccgagtagcatggtgttttgttttctgtatagcactaatttagaaagtttctattttctagacagaaaaataaaatagaaataaaatagaaagaaaatagatgtatcaaatagaagtaagaaattatgaaaaaaaacttctaatttctgtctatgttccggacactaaatacaaggaaaacagacaatgtttttgtctacattctgtgtgttttttctatctgttttctgaattttaaatttctaagaaatagataaagaaaatatacaatttttctctattttccatcaggtttttgaatattttttcttgaggaagtagccctatatcaagtttctagacaaaaaatagatccattttgtagacagaaaatagacctattttctttggtaaattgtgacactcactttaaattttccgcctactctccgtaatgctagctactttctctttattttctaaatttttttcataaaatattttcattttgcttcttgggtaatgaaacaagtttccaagaacacattatatcgaagtatgttcgagaacttggtaagagtaaaagacagcggaaagcttacgtaagactcagcttgaccctcnnnnnnnnnnnnnnnnnnnnnnnnnnnnnnnnnnnnnnnnnnnnnnnnnnnnnnnnnnnntgaatgcccccccccccaaaaaaaaaaaactggcgcggggcgtcggatttttaagtatgcaacatcgattcaattttttacaagaatgtacagtgtgagcaatttcattaatttttgcatgatatcagaggaaaaatcagtgaaatttcaggtagaaattcccaagattctactggtaaaaattcaatttgcgggggaaatttggcaatcttgaaattagttaggttctttcgttgtgacaaccaccatttacaatggaaattttgtaaagaagaacaggggtgatcatccttcctacggagatagatccgattccatataaggcgtaattttacatttttacgacttatactcttaagcgtccagcccacgtacaaactagaggcttcaaagagactcatcgatgcctttcctggccctctcattggccagcggtttaagtcggggcaatcgatgagtctctttgaagcctctagtttgtatgtgggctggacgctttacatggaatcaagtcttatcactggaggagcggttgtgagatataattgacgaaatactctgaaattcacccttaaagtgaaaatccaagtatttggacaattatacctgctgaaatgcagtggaagagcgtaattagaaaactgataaattaagagttagcattcatgcgttttaatctgaggaatttgaatctaacaagtgaataaaaacaagaggcaagaagagaatggcgtttttacaatttatgaaaagagaattaatgttttctaggaagtggatgtaaaaattcattaaattttcagagggaaaattaataatttcaaataagtaatattttgaatattctgtctcaatatgaaataaaattcaaaaataaaaaaggttatttgataattcaccgcattggcaaactgggtgttgtccaattccaaagtcccaatagagaattcacacgatatccgaaatccaatgccagtcaagaggagcggaggaaccaagaaggcaaaagagttgtggtcgagccgaggctctcgaccagaatgacagaagcgtcttcgagaaaaaacggggttagagttttttgaagtttatcaaaaagtcattattacaagagacaaaaaatgaatgtagttaaaaggtaattaagataaagagtgagactcttatctcgttatctcatctcacccttactgaaaaagacggcgcccacgtcgtcctaataaaagaaaagattactacaaacaatgaaaaagaagggtatggtgagttagggtgaaggccatgaaaaacaattgaaatcaaattgaagaggagataaagaaaagcacatattttaaagaaagctgcaacgccaaaaaaaaaaaaaataaaaaggaattataaaggtgaatttcaaattaaaaactggaactggaacaaaaaataacaaatgaaaaatttcatagcagacgtttcggaaaggtgagaaaaagaaaattacaaaacattttactcttacttttgacaaaaagaaaaatgacatgctcattgagaaaatcgcttcgatttttatttcatcctttcgcactccgggaacggggcatcgttgatacaagagatttgaacagaaaaaagccgtaccaaaatttcggaattacttgttatgctttactttacttttttttaccaatccgagccctccggaaaatgctccgggtaggccagccgcgggtacaacgccctggattgaccctagcgtccgtgtagcctctggaattactgccggggtcgttgatccacgacggacctatcaaaagcaaggaaatgctctgatctgaaaaaaagcaaaggcatcgcgatgctttatcacagaggataaacatcgttaatacaggataaaaagagtaaaaagtcacaagtttacatcaattccttaagctaggcaaaatacaaagtgtcaaatgaattatgataccaatttaacgtaaagaggaaaaagttagagaaatatttttgagaaatatgagaaattttgggaagaaaaatttattgggagaaagtaaaatggtcgctggatttgcaagacatgttaacaatttaaaaataaatctgtgtatgcgtgtaaaagacgaggtcatagatatttttatttttaaattgcgaattactgaggcttaaagtttcaccattgacattatttttgcgtggaagatcacacatgcagtcggtctcgctgtcccttgaaatcgggtgccatgttgatatgcaattgcgtctgttctccaggggatgcctttactatccctcttcacaaaaatagtgaacagattcacttagtttgaacaaataactcgatcaccttaaaggttttcaccgtaacaatactttgcgctgttttctgaaaaagatgctcatcttaattgcttcagtaacagttacaaaactttacaacgcctaaaaagcgagggaaccaaacgatagatgtgactcaggtagagaaatctagaagacaccgcagtcctcactctgagaaagtaccttccaaatccaaacaatacgtctattctttttcgttgggtgaacgactagcccagaggcagggtccccgactcacaaaaccctcaagagtcatcacaatacggtggaacgcaacaaagttgccgattcaaaaagggaaggcgaattatttgctaaacgaaaataagaaaaatttgattatgttgaaaattttagcgtcgtgttctcacgacccttgctatataaaaaaaaataaaaaataaacaaaagcaagtccgcgtgaagctaaaattcttctaaaaagaaacaaaaatttaaaaatttatcaaaaaagtataagtttgctaagaaaaatattattgcagcaagaacaatcaaaagctataatataccaaaaatgtgatagcataaagtttgaaaaaggaagcgcaatatcgattacgtaaagtggatggcaaatagggtagcaataaccatttctgattatgataagctataaagtacattattgcctgcgagaccatagcgttatcatccgttagagtaatatgtaactcctttatctcagggcattttctttgctggaagcctaaattcattaatttaatgttatttagagtctttgacagtttaaaaatgtctttatcaggattactaatcattttcaagttgaaaatagcgaagtctcggaagatcatcaattgccttcatctcattacttgtagaagtcttacatttgataaatcaaatcaaatggaaccaatcttttcgtcaatttatttaaacgacttttctcatttttgaaatctctaaaatattccaaactgaaatgattagacaagaaaataaatttatgatcaatgaatttcttaatgggtcgagaaattgtcaaaatgctcgaccaactctaaaactccttgtaattctagaaatgttgcagaccaagagggtagggggagagatttttactaaagaaaaagaaatgtttaagaatgaaatttttcatcatgatctatatgattcaaaatgtctcctgtgctgaattttgatgtatctaccaaaaaatagatttttaattcatcaaagaaatttattaaaacaggagggtaaacgactaaccgttttaaagtttcgaaagcttcattggctttgtctaaacaaagttatatttatcatatttcttattcgtaagctctatcagaggcgcagcaatattagaaaaattaaaacaaaaaaaaatttatgaataaaggaccgttaaaaaaagtaaaaaaaagcactacccagtaaagaacgaacgtctttttaacattttggagttttatgctttaaaatagcgtctaaatttgactgtaaaggagctaagcctttttcatcaattaaataaccaagaaaattgaggtttttgaacatttcatgacatttttcagtcttgaaacgaagattaaattatttcattcgttcattataaaaacttaaataatttcaaataatttttgaataaataagtaagtcattgatgcaaatgaggaatccatgataaaacaaatctgaaaatattctctgtaaagctttgttgaaagtactgggtgaatttctaaaagaaaccgaatagacacgtaaaagcacaatagcgtctctagcgcctgcttaaaagttgctgataatatccgccaagaaagtcgacagtagaaaagtaagtattcccttgtaattcagaaataatgttatcgatccttggtaagaggaatcgatttgggataatttttattaagttttctgaaaaatactacaattctcctattttatcggttaactgagttgacgatttttttatttgcgtctccctttgtaactaaaaaggctggagatgcataggcactgaaactgtcattaattatcgaagcgtgtttcaaattattcactatgctacgcagatgttttctatagatatttggaaaagaatagtgagaacaattgatgggaacttccgaatttacttgaatagttataggctttcatttttattcaacaattttagcttcatcagacagaggaaaaaacagatttggcatcgcacaatatttctcgagcaatattatggatagcaggatccaaaattgcatcagtattcaatttaatatctgaattataaaagtttgtcctagaaacattacaaacaatagtttcaggcactgagaatcttgaatttaaagaaataaatttatttgaacgtatgaagttaaaattttcattgaaaaattggtccttattcttacaaaagatatcaccaattagggtgtctactaatttctggaaatcagtctgtactcaagcagctgaatctaattcaatggcattaaaagcctttatggaatttaattaaaaccttttataaaagtcccttgtggcgtacaattctcactcagtgaattacttgatttaccgccattataaaaaagaatacctacgttctcactcagtgaattacctgatggtatcttataattctccatactattctcactcagtgaattacttgttttactggagttaattttaatgtaatccttagagcagttctcactcagtgaattacctgaactcatgggattattatgcattacgggacagttctcactcagtgaattacctgaaaccctgtatgaattattaagatttattgcgaaattctcactcagtgaattactttcgctttaaatcatctgcctcttttaatttatgcaatttaacactattctcactcagtgaattactagtgtaaatcctagaggaattattaaaattggagcgctcactctaattatgggatctgtacggaattcaattttctgctgtgcactgcattatgaaaatttccttcaaaaatcccaaactgtatttctaagaatactaacaaaattatgggacaggttttttccataaattacattttcctgcaaaaagcaaggagttaaatgaatcatttttgattcatcaattaattgctggctcataacagaacgtcgaattatatagtaaacattaacattaactttgcgagacttttttggtgggttatgaggatgtactactaaatttttgaaacccaataatcggtattttcattcaaagaagtgcttgtgtggccatgatttcgtctatagacaatgaatctaaaaggtctgaatcttcaaaatctgaagttaaaacaattgtttccgaatgcaaaatttcttttgtagcttccgccgtgagaatttccggttttacagttgaatttacaggttgagtacttagaaaaggtgaattaaaattacattcgagattttacgagtgagttttggtaagtgagttaaaggaaaatctgagttatcactaggatttctgttatgagaaatagttgaagtttgaggagaacttaaaaattctccaaaattctcattttttgaatcggaactcattaacaatatacaaaaaattcttagaaaatattcacacaaaatcatgagcacacaacaataaaaaaaatcgatgcatatgaaatttagtaaaaaaaaaaaaaatttttttagactgcacctcgtgggtgttgcaatggctgcccagagacacagcaatacgcacaaactgcagtggattcaaatttaataataataaaaaaaaaatttaaacactcaaaaaaaagaaaaagaaaatcctgtaaggacactgaatcactgacacaatggcactagcacaaagtatatgattagtaacaagtcaacaagttaaaaagtaaaaaaattaaggatgaaattctaattcaagaaaaattttgaacgcctttaaaaatttacaaatttctctcagatcatatttaaatcaaaaaacaaggtgaaaaattaagtgaatgcataataaaatgaaattaaaggttctcaacaaaaaagaagtttgagattttggaccacttgtgaggatgcgaaactatttaatgaaaaattaaaaaattgccggtttgccggtttaaaagacgggttggcaccacttgtgacgaccaccatttacaatggaaactttgtaaggaagaacaggggtggtcatcctgcctccagtgataagacttgattccatgtaagagtataagtcgtaaagttataaaattacgccttatatggaatcgggtctatctctgaaggaaggatgaccacccctgttcttctttacaaaattttcattgtaaatggtggtcgtcacatcgagagaaatttaacgacgcgatgatttgtaaataattagacgtgccacgagaagaggggccgtcatcattgcgaagagcataattaaaaaggattttcaacgcaaacaaggacccaggaacaccagtgggactttcatcagacaagaggaaccggagatccaatagaactcattttgtgactcgtactccaggttttgttattcctgacttgaagttccctttcaaatagtgcgagttcagcactatcccaccatcctgtcacgtaaggtattcagcgggctgattgttgaaattgatcgacaaagctgtagacaaagaagacaaaagagataaggaaggatcctactggtggaagtgggtggttgcaatgggcatatgaggtaggtaatagactaactaatggcaattctcgagagcccctatagatagtctatcattcactaccttaatttataaaaacctcatagtattttaatcaatataggttagctctatattccctatgtcacttttgtctactagtttcaacgatgagctcgctggccacaattttagagttttttgcccgactgtatcggaaaataatctaagtttgttgttttttgcacagtgtactcctgctcttgtcctcctttcgaatgcgtgtgtcaaagccgattccagtctttcaactggcaccagtcaaaccaggaaacctactggatgtcagaaaacgttcaaccggttccaaatcaaatcatcgagagtgacaccaataactacttgcctgagagcaacgccaccaacctcaacaccagcagcaacaatagcaataacaacaacaacaacaacaacaccaacaacaacaacaacaacaacaacaacaacaacaacaacaacaacactgttccctacgatttcccgcctttcggtaacgatttattcccggcagacgagctgttccaactggagcagccaatgcgagcgagctacagaggagcaccagaggaagacaaatgttcgccgacggtgctggacctcggtagcggaaccatccatcggacgacgttcaagtcggaaccggacgccgagccgtactggctcaccgcggccaccccttccgtccacaccgacgacagcaactgcagccagatgaagcagttctcgccgaatcacagctatatgaccaacttggccgataccgacgtggacgactcgagcgagatgagcacgcaccacctctcgccgggcgcgcagccgccgaaaagcgggacgaatttccatctgctcaacgccgaggagatccctttccagtacgtgagctgcgattcgtacaggatggaccaatgcgtgaatcagtacaggtcttgcgatgctcccgaagagttcaattttgcttgtacgatggatgcttctgtccaatatcccagtgagcaactgacgagtctggattcgacgatgatgacgacgtatcctgcgcgtacgggttacggtcagccgacgcatgatctcatggtacaaacccctcactcctgtgatgagttcatttcgctggccgatttcaggcttcctcagccgtcgacggtactccatcatgagacttacttgccatccaacgctcactcttgtcagacgcctggttattgtcatcagtga

SEQ ID NO: 11 - DNA, 12321 bp, Bemisia tabaci
  source 1..12321: mol_type = other DNA
ggttaacttcactgacaccttttcttccacatcatctaatcaatctggtctaatttttaattccacctttttttaatttctctacttcggaagagcctgccatcagtttgccagtgtgtcacactggcccctccaattgttattattttggcctgaacatggtttatagtgcaatggatcaagttgtgccaaatgaatacctccggaaggctgaggattttgctgacttggtgagttttttgggaatttactgcaattcggccctttttttgagtcttcaaaatataacccaggccactgttttaattaagctttccatatcaagcgctaaagtacaacttgtcggtgttggattttctattacgcaaggctcttcagacgacaagtaggaaaactgattgataaatctttaacgcataagaactatgtgctatcttgattttatcaccacttttaacagtggataagggcttatggctctttggatgaaaatgtaatcaattttcatgctctgcgactccgtaagacacctgaaaagttgattggcagggttttttgacctgaaagcaggagttatcagttttctaccatcaatgaactgcattctttgactgatcttggatctgtcattcaaataagtaatcaagtggtgatgattgttcctatcatcttgccacacgtcaatactgtaatcttgtccagcaggcaagaggagctctggtttacggaacttatctttcgtgtgtagttccgtcaacttttgctagtgcggacagggctttcaccaaaaatgcgcccaacacaggtaaatgcatcttatgcatccaccccttcctcccctctggcacgactatttattggttcttattgatgttctaaaacaaatgataggggagcggcaaaatacaggcggccgttgggcggcaaataggttaatctggccctgcttttggggttctcacagatggtggtctacatgcagagatcatggatagatgtggcctgaataccgtttgatttttacaccaagacccttagtattattctcatggaaacctcgatgcaataaactttttttaatgggctctaattaattttttttaccattttcaggtttataagaagacaaaagtattccttccaactgcttcaagactgtgtctcatctcaactttcatcgaagatggtttgcgaatgtacttccagtggacacagcaaaaggagtatatggacatgtcatggggttgtggcagctttctagcaactctttttgtattcatcaatctagttggtcaattaggaggctgtgttttggttatagttcagaagcaagtccctgctgcgtgtggtgtgctctttttcatcgtagttttacaggtaattactcctctttctcatatttcagccaaagtagcatgactgacgttaagaaaaaagaaacatcattttcaaactagagcaagagaattttgcaattgtgctatgtttgtctgctcttgtgaaagtaagtcaggcggttgcattaattcaagtgaacatatgtgcacctttagcgggcaataaaatgatgtactttggatagtaagtccaatgacagtgaggtgaacattgtaataagtctagagaacattgaaatattgattatttagaggcatcaagtgacacactgagtgtctagtatatcgacggtgaaactaccaaaccacgtatctcgtttgcggtgtttaaaaatctacgctcacattttatttttttgaagtagaccaaatcaatatcattccttgaaattttagaaattttcaagactggatgttaagtagtttttcatttaaaaaataaagtatgacaggaagtctgcgacgtcgcaaaccgagatacgtggtttggtagtttcaccgttgatatgcccttcatacatcttctttttgttttccacgtttttttatttttgtcaaagaaaaatactgtacgtcctttttacaaatcatgcatcagttttgccatttttgcaacatatatgtcgattaaactacatggaactttgctgtctgagcagcagaaagttctttttttgccattcatacaccttttaatttgtttgagataagaagtaatgaaagagtgtaaaattataacaagttctatacattccaataaatgtctctcaaattgctgtcgaagcactaagcacctacactctaatttaatcatgcgaatatagaaccactcatatctaaagattctaacatatcattattatattaccttattatcagtgcaatggccataaaaccgaccaaaggtttttttctcttttttttgttaccatatctactgggtagttaaaggcaatgcttccccaaacttttcagtctaattattttggtcctccagaacattccatttggtccgggctaattatattttattgatccttccagacttttgcgtatgatattctctgggatctgcatttcctattgcgtaatctagctttaattggtgctctactcctcgttctggctgacagcaaagctgaaacaaggacattgctggctggtgttccaacattaggtaagtttttcaatgtttattgatagcctggatttcatgaactgttcaaatgtcataacttggtcactaattctattcattgtcagtaaatctcagtccagtgtttttatccacttttagctcaaagattgcagctgtagttagagtatactttgctattcacctagaacagtcaaacagtccaaatgtcttgagtttggtgccaaattctgcacagtggggcaaaatttttccaactgccatttttcctttgatattttaagtggagaccaatttatgcatcagagttgatttatatgcctgtccttgagcctgaaatttgttttcaaagcaaatagtttaaaaatttcgattatgtgtagtttgaattttgcaccatcattaccaacaaaattggaaaactaaagagagactttaatgctgcgcagccatcatgacatatattcaagagacattcaaatattcaaataaattcaagaaaacctaattataatccttattatagctcatccatgtggaccagttccccaaaaaaaggagaaattaaggattttttccagacagatcttgtattgtgagtgatttaaatacttatttagtcttttaatgttcatttcaattcataatttatattttgcatttgttttagatacgaataaacctaaaaattatctccagcttggaggaagaattcttttggctttcatgttcattaccctaattagattagaaatctcatttttccaagtaagtatcaatgattatactttttacttcacccataaggtcaaaaaacatctgatgtatcttaaaattattataattaagtctgtagaacaactcgattttgtttatggaatacttaaggtcccttttcccatggactgtcacaaaagatttaattgtcaaataaaattttgcaacattgcagatcaatgaagaccccctagttcttaccccctcaattacctacccttatcttgccttaaacaaccttcaatcgaggatgcccggatcctgcatttttagtattgcagacttcactgtggacctaatgcaaccctgaaattacatgtgtcatcccaaaaacaaatgtctgctaaaaggaactgtaaatgctcatgatgccttttactggtaaatctttaatgcttaggtttattttgtgctgaccagagtcatatattctttaaaattttacatgaatggctaagtgcaaagaatgcgtatttccattaagacattgggtgcaaaaagagcatttcttggttgcggtgttttagaatctccaccgttaatacatatcttagaggggaaatttttgggtgaattttctgaaatgtttcagtttcagtattgtaaaatcttagagaaaattcagtgaaaatttcagtgaattccatacattttcttcaatcatagtgaatgaagcgttaacagaacttctgaaacagcgcaattaagaaatgccatttctgcacccagtgcttcaattgctacttttagaaatctcctatcacatcctttttttttcaaagaaaacaactcaaaatttctccttgcaattttgtgtgattatttcaaaacaagtgaggaaaattctcaggaaatctcaataaaaattgtccgttcgtttctgtgggaagatgagttgagactttcaataacgcagtctgaaatacgcatttttctacgttgcaatcatttttgggtcactgtgtgtgctcgctttaacaactgtgtgattatttctttcattttcattttttttccagattttgcaagacttatttagctctgcattaatgattttagtaatgattggctataaaacaaagctaagtgctttgctgctggttgggttcttatcattcctcaacttttatcataatgcttggtggaatgttccatcttacaaacctctccgagatttcctaaagtacgactttttccaggtatgtattgcacataattttgttgttctgaagcttttaagtgaaatcatatcgcacgaataatgattttgatgcttgattgtcaaggttgtttatttctgtgctcgtgcaaggagatggacacattgaaatactttcccaaatttactatctagttggctgatctctaataattttaattttgtcagggaccaaaagaaattataaacaatatttttccttatttttttttttcaacctgtatgaggttgattggttgcaaaaaatgaaagtttaaaaaattattattactgactcttttattggtctttattctttcattggttttgacacacattttggataacagtaagactatgtaactcatattttcccttcaaaccctgaattaaattgcagatcacttttaaatctattttttattatctgaatgatacacagatctgttataatggaaatttagtcttcagtctctctctttatttaaagatactcaatgtcaacatgtttttaacatttattccagcgaatttttaaaaataagccaaaaatagtgcaaactgtggtgaaaattgaaactaggttttaaaaaaagtgttcagcccatggttcgtacgtagttgttgttagctgacgtactttaaagtcggtgactactcgcaagtatcagcctcacaagtccgatctagagccataagaatccattgttgccatgcatgagctgtatttgatagagtcaaaatgaagagcctgatgaatgctattctttagcccctgaaatagacatttttgtctgttagaggctcaccaaaagtaaaaggaataccttatcaaatgaaagtgttgtccttttacgaaaattgttgcataagaaagtatactacagctgcttctactatgacaaatttctgactcttttggcttgcagttgcagtgattcaaaaactgagttttgggtgcaaaaatctaaatgtaatttcctttagtcaggaggctaacgcatgtattttcctctttcagacgttttctgtggttggtggtttgttaatgatagtgctacgtggtccgggtggtgtgtcaatggatgaacacaagaaagattggtagaggctacaattaaaggaaatcaagtctgaagaactcctaccaaaaaactgctacttctctcgaattgctcctcttcgctttgtctccgtaagcgtccaaatacttcttatatttaggattttaattttataaaggagtttattttcttaaagatgaattattgtactgtgtttcagagctgttttttataatcatattttgttctttaaactcagatttgccctccatcccatcttttttattgcacaatctaggcaattttaaacttttacttgcagtccaattttagatgttccctcgagtatttcgtgaatatgcgaattcctctgtgactgtgctcaattcaggagcaaaggtctacgttatctgtcccggtttacagaattttttactcaggtttgccgatctcctacccatgcgtatttcaaatgttaacaagaaaccacatccattaataagtgctattcttaattgcaccataagttctgaatccattgataaaactcttgtcaagggatttataatgagctaagttttcttaatttctcaaaaacaatttgtaggtttggcaatcagtatgcgaccagtatatgaggtaggggaatatttttgagacggctccggaaaaattctttttctgagtgtcttgttggtcgcaaacgaaaacagaattaagtacaattgaaaggattaagaataagctttcaattacaggtccggaatttttgagcttcaatagcttttaagaattaaaacttattgattgatttaaactaattgataaaacttacttttttttttctaatgatccatgcagacccttcaagaaatcttgctcgaaatagattttataatcttttggtgctggattcaaagttattcccaaacagtaatgtttttctgggagacccatgttatttacatcataatcaaggcagtattaaggtgacatctatttcaaaggccttcttcaacctcatacagtaataatgtaaatcatatgagtctttctgaagaaataatttgttcatggactatgatagctatcatgatcggtttcaacacattttttactttcatgccctaccaaacttctatgtcttcccctctttctactatattttttatacagcctagaggtttggcttttacggatcgtataaatagttataacaagatatttatgtggaatggtgcaatctcttcttcttggatgatactgagatggaaaaaaattaaattccctatgttcgctgggaaatccagggtagcccaaatattaattcttcagtcatctacgtcaattttacccgagtctgctttaagtttggaaccaagtgaactcccctgagaaagagaaattaatatgaggcccttcctttcagtttgagcaaattcagtggtatgtaagaacaacttaacatggcttgagtacctttaagattttgagagcatattccaagactttggaacatgtgctggaatgaatgctgccttgagtgatagtgatattccttcctctatcaagtctacttctatagatcctgcatcaaggtgatgacatatgttccatcgacaacagaactgttgtcattagctttcacagattgcagtatgcacccggtgtacacctcaaaacaaatgtggcatgccccttgtttcggactctatatgcgctatctggctgatggaatgaattttgaaacatagaatatattttccattctaagcaaaacttaaacccaagtaaacgaatctaatatctgtttattgtgtatcagtgttcgacatggacaacatctccaatacttacatcatccctcatctatacattgtctctggtgtcaaaaccacttaagatctctctcataacaagggaaggcagttttctgtaatttaatttttaattctattaagtttatcgtgtgacaattcattttgtctatttgacaatttaatttttaattttaatcatcttagatgtacgtacgttcttgctgttattgacagctgccaaattttgttagctttctaaaatgtattctcacaaataaccggattctggttctctctttaaagttttgcatgtctatttacatattatgtgaatgagtaggtgatagcaactgtcctttatcagtaaaatattcattttccatgcctggaggtcagtaaatacttattgtctgccccagtttacttttatttggcacactcatgcatagagaaaactagtattagtcttgaagtacatcaatggctaaagaagaaaaatgcaagtcactaactgcaactttgggaatctctatttttgtttaattttttccagagaaaattcaccaacagaatgagacaatggcaaagaagttttacaggattaatgtaaaattttgtgaaaaaacaaaaacatttattaaatagttcaaaaaagcacttctgaggtgaaaaaaagctaattaaaatctgactaaccaaaagctgacagtcgagttgatatagcagtgcgaaacctgaaactgagctcagccaatcagcaaaagctgttgccccgctttgttacgtcatcagagccccccctctcccaaatatcgttttaaactgatcgcatttttggcattttcaaaacggattctctttgctaatttgagtttttaaagatagaattcctagaagctcggtttactccgtactttaaaaaaatgggtgccactggcccatttcttgacagctcctgcaaattgttcaaaaatattcacagaaagttgcaaggagaaatttaggttagtgttcttatagtctgtttgtgtttccataatcagagattcttaaatgtcgagaatattcgaaatttttcgacttaatctatcgatgtgtgttctccttgaaacttttggagcctgtgaagtttgcttatccatatagcagtgcgttcatagttcatgtttgtacaaatgaggcaatcgtagaagtcattaggttgaaaatataatgaaccttttatctttctgcctttaatttgctttaaatatgctcatagtacaatgacgtagcctcagaagtgtttttgtggtctcaaaagtcccttgatgtggcctttttttgccattttggcataaatattacattcctgtcaacgttacacctttgcctctccagaatcatcgtaatatataggaactgaattttttttttttttttgtatgaagaaactgcaaagtgtcactatgatgctgtttaatatcatttctcagagtttctgaacaagtataaatctccattggttgttaaaactgtgactaggactggaactgcagattttctcttgcctcataatgataaagtgaattcggcaggtagaattgtaatgcgtaaattcaatatcgatgaatggtaaagatacaattctttattatttaaaaaaatacctgtcaaaacagatataaccatgaggcagtagatcgtggataccaccttacgcaccacgcctggaccactacctgacatttgattgacgaattgaatggataactggaacagaattaagagaaaatcggagaattggaagacctttttgttttcctggactaccatccatgccaaagagacaaaagttgaaaattaccatcagcagctttgttgctggttgcacagtacttggaatcaaacacaagaggacagtgtgtgaaaacacctttaataagtgaagtaatttcaccatttggttgggttcttcgtcttcaagcacacttgtatctctgaataaactagctcagcagccattgctcctcctttccaaagcatttaaactgaaatcggtcattacagggggacaggtgattgattctcccttttaaccatcaaattagtgcaattgaatgagtatttactgttacacttagttttctctttcctttttaaaaatgtatgtacaattaagatgaaaggactgtttttcaatttgtttatatagtttgttttattttttatttttaaggtaaaatccacaaattgttttaatttaagaggtaatgactgcagtaacagcatttcttggaatatattcttttcaggtccgtgcactttaacaattgatttatgtccgcatcaatggagttggccaaatcatattccattgttattatttttcttcctttttttgtatcctcaataacactgtatggtttacatcttaacttaagaggaattttagttgcttctcaatccgataaaaaatgctgtgttgagcatagtaaataaagaacggataaagttcaaattttgaaggcagttaaaaaagggaggtttacacaggtgtattcaaggtagaaaagatatttctgcagaaatgctattgctggatccagcgcttcttttccatttagagaaccagcttgaatttttgcatctgctcaagtcttatatcttaatttatcagattttctctcatatttcttaattaaaggaaatcatttgctgctctctcatgatctgtaatacatttctcttttttcttcttctttctttcttaatgtgtacagcaaaactgttgaataaataaaattttaacgaagtaaaagttaattattaaacatagtaagtaatcgggttatgtttcatatgatgtccctcagttattaggtttcttactttaattaaaattctagcaatgttaagtagttatgatgttctttactttttgttgtcaacctctgactttacttgagacaggaaatgttgagttttttagttttagaaccccactctattctcaatgatccttttttttatcatgagttttcccacccaagaaaattttggctttgccatcacagcatttatggtttcttctctgaacacttataaatttaaagtgtttcaaagctgttctgtggcacagttagtattcatgcatttcctacgccaaagtgcctctgcataaagttgattttagttgcaaatgagacagtattaagaaggaaggaactactgtttacaagaaacatgatgtttcggctgtattctgttcaagattcgaaaagttttaacaattggaaccataagcattatgcagacgcattgtaatattttaaccattaatagctgccagttcgttctgtctgttctttcaacaaacattcgacaccatacaaatattttaacttgcactttgcaaagaacatattctcggtgtcttctgttgtttgcttcagttgaggagctatccatggacaatttttatgtaaggatacctgttatctaagaaggtcgtgttcgaaaaaagattcccattttttttcttagcaattacttaagtcagaaaaattgcgattatacccggtaaaaagctgctgccctcagcttttcttttcaatttgttttttatttgtatttgaagcatttgattgctcacaacattagttttacaatgagtttgttaaaaaatttcctgcctccttactagaaaacaatcttaagagcaatcactcaggaactttaccacaaaacagaggtttgacaatcagtagaaaccaaatttcactttaattttcagctcttgtcaacgtagccaaccttgaatttggatgcatttttcaaaccgtgatatcagcctcttcatcccattcatagaaaactttttatccaaactgcgaaaaaagcccatgacacctgctttcagctcctcagcggtcttgaatcgcttgccttccaagaatttgtttgaatcatgaaggaagtgataatacaatggtatcagatcagaactgcatggtggaaaaggcaattaaaaccatccaaagcctgtgatcagatctgtggtccctccaagggcgaaaacgtgtgggtgggaatttttgtgcagctgtaactaaccttagcaagatttcaatttcgacaactttaaattgtgtctggtatgtttttcagtgtcaataatgggacctttctttagaaaatccaccggcaggattccgtgcgttttttgatcatgagtactggtcagatgtggcaggaaatttttggcacgggctaaagtaaaacttaattagtgcgtgacctattgcttcaaattttaaaaacaaaaacattgctatatagtcaacagtagcagctttatcatggtataattgcaatttgtttagctttagcagctgctgagaaaaacaatgtggaaacttacctagtatacgacccctatagttgaatgcaaaatctaataattctttcctactcactaactgaagaattcaggggtacttactaaatatgaaataaacttgtaaataagtaacacgcaactctcacagctggttaatcttcatttttaacttgtctcgctgcatgagattcttgttttctgttattttggttttttttgtcaagagtttcaaacattatttgacttatataagttactctaggaagtacttacataaagtaaagcattttaaagaatttaactatttgacttcattttgagtcttgaacagagttgtcagtacctttctgcagtggcatgatatattcagatggaataaaccaagaactgagggcttaggtgcggagtaaaaaatattcaatcttcgaaaccaaaagaaaagacaaaactaagaactgaagcttctgcctaaaatttcagattgatgaacagttaaacgtttaattaaaagaatttattacaacagct

SEQ ID NO: 12 - DNA, 11449 bp, Bemisia tabaci
  source 1..11449: mol_type = genomic DNA
gcttgataagtattgctaattgatctgtgattcccatgatattacacggatttttcttgttcctattattttgattgatagtgagtgttagaaagattattgtgatcatgcatttcgctcaatctcacagcctgcttcgctgtaaatgtcaacaattttttccttcttgtagaaattttttgaaaactcggtacgtatgtccataacttctcttttttttctcttcgtaaatctcaaatttaagtcaattcgaagatgattttccgtgctctgattaaagtccttaaaaatgagaaagtggcatctcagctattctttttactccggatctctagaaattattctttggaatttgtcgcaagttttttctaccatctaattacgtattttcttcatagttggaaaaaatttgtcctttcgttccgtaaaaatttaaaattgaattggaactcagttccatgtttactcagttccatttttcaactaacaattcaaccagttctacgctcttaccaatcaaatgagaaagtgaacaagcgaacgcactttaatcttttgctaactccaagtttaaaattaatctcaatcagttcagtggaaaattcctgccatccagccaatacttagacgatttaagcatttttgccacacatgtttccagtcacttattctggaatgatccaaacttttcaggatgattatggaaaacaatgtacctactttcattaaaattctcatcagcaagcacagcaattagaaaatacaattaagtcctatacttttggttcatcatctgaatctgttttttattttgtcttgtgtttgttgcagaatttttgataaaaataactcttttgccaatgttaccgaaggactcaaacatctgtacaaaacaaaattgttaccactggaggagaaatatttctttcacgatttttatctccctaaaatcacagatcaagattttgatgctaagcctatgattttgttaatgggacagtattccaccggtaaaactacacttatcaaatatctcatcaatggggattttcccggaatgaggattggcccagagcccaccactgataaattcatcgttgtcatgcatggagagaaagaaggttatatccccggcaatgctttagtcgcagattcatcaaaacctttcacaccattgtccagttttggaaatagttttcttaatagattgcaatgctctttatcaagttcgccgagacttggtgaaatttcattcatcgatacacctggtattttgtctggagaaaagcaacgcattgacaggggctatgattttaccggagtcctggaatggtttgcagagcgagttgatcgtatcatccttttatttgatgcaaataaattagatatatccgatgaatttcgacgatcaattgaaattttaaaagtgcatgatgagaagataagaattgttttaaacaaagcagatagaattggtcatcaagaactgctgcgagtgtatggagcgttgatgtggtcccttggaaaagtactaagaactcctgaagtatcacgagtctacgtcggttcattctgggatcagcctctgcagaatgatatgttcagaaagtaagtaggcattctggatgcatcagtaataccaagaatgggtcaaatgagatttttatagtgagccaataacagccatgtctcaatagttgtcaaaagtaccagtggaatgagaataaaacctctggacttaagtcctccaaagtcctccattttcatcctgaagatggaagtttgaatttgtgagggctgcattttccaatttttcttgttttttcaaaatcaaattgcttttggcatccgcgatagggtaaaaaatttcactaaccaaggtattcgcatatattgcatcagcgaatcgatctttgccaataaaaaattgatttattgcagttaagtaatattttaaaaaaccagatgattaattaatcttttttattataatttgcaggtcagtgatcataaaatctttcctttaaagaggagaatgtaacaagccttcatctcaactttgtacaactttattaaacttttgcctttcaggttgtttgaggatgaagaaatggatctcatgaaagatattcagtcgctacctagaaataacaccttacgaaaactaaatgacataagtaaacgagcaaggcttgccaaagtgagtttttacccctaaatcctccaataattaacttatgcatttttcaggtaaggttgtacaatgcctcatagccgttttacttaagctgagaattcttgaagctaatgatttcaccttcctttaataacatatgtgatcagtcaagagacacctagaagactttaagttaaaaaagatgaaaaatcagtcatcgctagcactgcctggagtattttctgaaagaaaattcactatacttaaagttaacatgatttgaagtttacagttctaagtacaaagttttgagaataaaggaaccaaagttatgatttagcatattcctgaatggagaatgtcatcatcagccaatgcagaagtttgtgaaaaaactggatgtaatctagtttatttgcctcaactttttgcaaggaataggtctcaaagttaactaaaaagaatgtactcctaaaatatataaagactttctcatggaaaagtaaactagagaaggaaactaattttttcctagacctgaacatcaggaaaatttcttaaaacaacgtaacattgagtgacataagaggttataacaaaaaaagtaattaaaaagaatccttctatgatgctatggaaatattccctacgaagtctttcaattttggatgtctctggaggaacaaaaaaatgctccccttctaagctttactctacctctaagatttgttcaaacctgttgaatgattgaacctgatttgctcatgatttcttgatgcctgcctgtttgtttgtagactcaggcttatttaattgcagaattgggtggacaaatgccaaccttcaacattttctcgaataaagccgcaattcaagaaaatttaatcgacaatttggcaagtatgttccaaacaattcaaggtcgatatcgtctgtcaccaggtgattttcctcaattagaaaaagctcaggtaaagttggttttccttgccctcattttatttacctcttcttggctgctagtgctgattttttctctaaatcgtgttggatgctcttattgttggagctaaaaaataggtaactagctttagttatcaatgaatgcaatacgttatgcatttaccctgcatctttcccttctcgcaggttaccactcgctgacgtctttggaaagggactgaagagttcatacgtagctagctgtttttggaattttatcaaaactttgctaagtcacaattcatgcataattttaaatgcagtcatattgacttttttcaagcatatacagtattcatgcgatttagagcaattagttaatgactggagatggaaatatggaatcctaaagtatcttataccctttcagagaacatgcatgaagaggcaaagcgctttaaaaactgtgtgtgcacgtatttccattgatgcacttgtgttgaatccttaacagtatgacgggcagagagccaaaaattttaacttcaaggggtcatctaataatttatagttgcagttagcgaatggtatcagttgaattatagcactcaggaaaagattcgcacaaaatactgtaaccgtcaaaaagtatcaagaacctgagagaatactgtattagtctaccttctattatcatttttcaactcaagcacttaaaaccacttatcttttttaggagaagttgagagcatatgatttttccaagtttccgtcccttaatgaagatctcatcaatgctgttgatgaaatgatgatgaaagatctacctcaaatcatgtccaacatacctgctgaggagagcaaacaaagtattattaccttatcacttttctctattctctctttttctgcactcttcattcttttctctcaatccttgtgggcgagatagcatttgcatcttctagggtttcatccgctgctttcctaaagcttattgccatgttactcggggagctcaatgcctgtaattactgtctccggaaagcaggcaaagatcactcctccaaacaggtgtaacccatttatagtgtggttttcactggagctattctcgtaagttctagaaacttgtgagcttgatggtatgaggttaatttttttgttcccttaattggaaacattcagatttcgtcaagtagtcatctactttgcctctgccttcacaccaaaaacaagcccatttatcaacaaaaaacaggagcttgctgtgcattgcagtgatagattgtacttgcgcttaaaattatagtttgtatacccagctttggtactgcgcccagtttctgatctgaaaattcttaaattttatgtcaagtggattgagaaactaacttaagtcgcaaggcaggactaggaatctacttcaatatttgggtaatgtagttttgaagtaaaatgttaaagtttaatgcaaaaagcaaaacaaactacctattgctggacagccaactagaatcagtctggctgcattctacactacctaatttcctcttatgttttatttttcaacagaaaactttaaggcttcatgaatatttgggtattttctttgtgttttacgggaaatgcacctgaaatttcaaggcattatgttacctggtttgtgattgaaaaaatataacatgaaaggaacttaggaagctgaatccagtctgttggtcttgttgaagtgatgcaaatgtaggtaataattggactacattttgcaatttggaactataaattgtagcctggtttaaaaacaacgtatgtaccattagttgccttatgcacataattgtttttccagaagagtcagaatttatagttccaaattgcaaaatgcagtccaattcaccttaattattatctaagagggcaacctgccaaatcttcttaaaatgactgtcacatttatcatcgttttcttacactgaatgatttattttcattctatgccattcatgagcaatgtgtcatttctctctagtttttaagaaaataatgttcttttatgaatattttttttactctgtttagatgagttcctaacaagtgctggtctagaaaatacaccttttggttatgatcaaggcgttggtatcaatgaaggcaaaagcgaacgtggatgggtcgtcgaaaaatatagacaaaaatatgacagtatttatgactctttagctcacaatgataacaagattgttgtatcaggtactttattttcctaccttattttattttttatttgtagttaactttaggccaactatcattattttgcccttttttcatgagactttggcaaagtgtttacactttgcgagaccaaatcttgatttataaaaatctctcattgtttttcaggaacaaaatgtagaaactcctctctagacttttttcatttttagcgagacctctactgggtgtttttgataatgcacattcaggcaaatcctcaaaaatacttgagaatagtttatctgttccaatttttaaatgaaaagatcagggtaaaaagcaatattggccttgccctaaaatgtcagctcctttaagtgttacaagtcgaatctacacattttgcaataactacgaatatttcttgcctaaaacacatgtcagggagctttaatttgacagttgcccaagtatggatctgcaggtgagccaagcaggaattcaaagatgtgcagaatgatgaggaaaatgttgatgagttcccagtaatatcttacttttgaaaccctcccaaaatttttgctcccctgatctttctgccagaaatatcttttttatcttttccatatcaaaagttcgtgcaagtgacctacagcaagaactgtaattgctcctactgtgttgcctaaaacctgattgtctcaagaaggtctggtgcgcatcaaattgaaaaaaatgttcccaggggtttaaacgttccaaacttagttaatataagtgcaaagctcagctgacaagtcaaaaaaaaaggtcactccttttaaaactgaagtgaaattttttgaaaggccacctgaaaaagccaaaggggtgagatcacggaaggcaaggaactctctgcacctaagtgcaaaattgcgcaacatattttaagcctatagttactttctttgtgtagagaatagacatggtgttaagctaaacacccaatttcttgtgaaaagttgttttcgaatccacacaacaagctatataccaagcaatattttaaaaaaacaaatgttcatacatgaaaggttgggaagaggggaggatttctgggacttttcactaggtatgacaatttctgcgaagttaggaggtccagctagcagcactactaataaactttccatgtctcagggtcagtcctaaataaaaaaccatcatcattcaacaatcgttctgggtttggggcttctcatactatgtaactctacgttgggattttttgatccctcattatgcttttataacacacaacacaggtcttcatcctgtaacataatactctctcaaccacccccctccttttcatagcatgatgtattttatgaacagcctttgggctaattgctgcttttattctaaactttgccgtgtcaaacatacctttgggcgcactattgattctatttatttcagcttctaaagcacagtttatgtttgctgtgggatttgaagcatacgtcaatgaaaaactaattccaatttttcttcatttttctgcattatagttgcacgtgaagaaatgatgaaatcaaaactaccaagcaatgtcctgggcaaaatttggaatttggctgatgttgacggagatggtgttcttgatagggatgaatttgccttgtcaatgcatttaatagacatcaaattgaaaggtcatgagctgcctgacaagcttccagagcatctaataccaccgtcaaagaagaaccatgctccaagtagaccctaggaaagtttggactaacacccaaagtacagaacaaaatccaagtatgatagtttatcagtgctccaagtacaatccaaaactgtaactacttattttatttctaatgggtcttttatcagctgttccattatcttttgtaataatagcagcagacagttcaggcaaactagtctttcctcctcatctaccaagtgatctactgaaattcaatatgtattagcacatgcatagagaggtataaagataagttttctgcgtctatcctccaaatggttaaaaggacaaccattgcaccttaaaaaggtttttactcaaatgaagattttaacatttttatttacctttttcatctttggaaaaaaaataatgataatagtgtaagtgcccatggtagctacactaaaaaattcaactcaaccttttaactttgtgtcctttgtggttaagtttgaatcgtttttgaagaatgtttatgatagtattatgaggctgcatttccaaataattttaattacataaaatgaatacattttagctattcaagaattttttaaaaaaattttaggtcaaaatctaaaagtaatttccaatattttttttcaaatttctgtggagatattctcaagtgcaatgtaatgtaatcagacttagtctccaatatttttgcctctccttgctttatctctcttctcattatttttcctgcaattttctctgtaaccttataaaacttaaaatttaaagaagaactataaaaaaattctgggtatatttcttctgtacatggtatttttccatgtaaccagatattgttttgcataattattaaattatgtttgttattttcaaaatgttattagtttgtataagggtcactccatatcattcaattgcgttgagactcgccatctcagaatgcttcacattgttatgaaactttatttccaagaagttaaacaggatgtatctgtgtgtattgagaaatctgtaaaaattccatctgcccaataatttgaattaaaatttggaaacattaccatcaaaacgcttaaattttgaaaaaaaatattttccaaggctctaccgcctttctacggaaacaaatgtcttgtaaatcatcataattttttcagaatattcattgaaaaatcgatttccagcgtgcttctcaaagcaatgccctaatttgagattttcatacaagaaattgttacctgggtttgtcaatgaaaattttgtctgtctccctcatgaaacgatgggaaaaataaaaaaaaagaaacttggagataagtcaaacaaaatgtagacattttaaataacagtcggttcaggttcacatcgtcctagaaaaaacagagcaatggtcagattctaagatcttcaattattcatctattgcggcctctaaattttttaagtctgggtcattgaaggcttcggggttgcagggcttggcggcttccgaggagagatgagcaattttgccacaggaacagaactattttgcaatgcgcaggtccaatctttctgagggctggtatttccttacaggcattctgagggttattccactttttcaggtttgggagaaattaaattaaaaagttaaaaaacctagattctaacctgagtcctggttattgtagcttgatgcaaacctgaaccgatggttatgaaaacctctaaattttgttacattttggagttcctaattttttcatagcttcataatagaaatcaacaaattctgagtgttttagattccatactcaggtgaattattatattttgatggtgacgttcgtaaatcgttttccaaattgctcgaatttcaaactcaccaattttttaaagcaggaagtccctccccattttgcctcaagttttaaaattttattatctgcattatcggagcattccatgtttcagaacgacttctgctcaacttgtggctgctaaagagaagtagaagagttgaacgaaaccgagagcatctgatcttaaaaatttttagaaccaacaatatgaacagaatgctttgtcaaaaaatttaaaaagtgaaatcacaagaaatcattgagttttgagaaagtgatcgcgtgcttggttggaatggtcatgagtaatccctgaaattattgattttcgaaaaacaatgataatattttgtacaaacaaatttgttttgtcaaataaaatatgttataatttttttacaaaaatgaatgtcgtgtagcatttgaggtgttgaaagaaaaaaaaatcagatgatgtcattctaataacatttatgaacacttctaaaagtctttgacaaatagagccatcgtacacaccacgagatagatgaagagctgtaaaaaaagtattgaagtcagtagaagtataaattccgttttaaattttgatggtccatgtgtcgcaggcaattagcagtcgccggaaatttgcaagcggttcaaacgctgtttcaataaatcgcaataatgcacatcggcataatgcaatttttaagggttaaggtcttcaaaattatgatctcggcttgaagcgccttcattctttgtgatactctacgctttgtcacgatgttagtttagttgcctgccccaactaatgtcgcgaagttcaatgcacgctcctctgagtgtgcatatttctgtcatgttttcgaagatggaaaagtgtctattcacattacaggcaacacaatcagcactctaatcttattcttttatttttgaattctatgattttctatatttattcaccactggcttgcaaattgccggcgattgctaattgcctgcgacacatgcaaaatttagaagagttattcgaaattgacttcgttgcctgttcatggatcctaatgtaagtttgatgtattttcttagcacaaaacatgttgtttctctggagatgaagatcagaaattttttgtctcttaaagtgacagaggtgtcaaattgagaactatcacgtttcccggccaagccagcctttaaactatggtaaatgaaattgcaatttggacaattttttattattattattatcaaagtcacacttggtatttttataataattcttacatacctcagtacacgagatggaaagagaaatttcaaagaacttgaataaatttcacaaaatttgaaatttattaatcttttttggaattaataattgaaccttcggagatttggaagcgtttcaaatggtcttcgtgttggcagtattatactaccttacttaaatgctacacacaaaggggcggcggaacaaggaggagttcagagagaaaagccccaacctaaccttcgaaccaaactataacatttgcatggtttaggcttggggtgaaaatttcaaaatctagaatcactgtttttaggcgttccttggcctcctaaatgcatccccaagagtctcacaaaatttcgtgaaatttcttgtaaataactttcatgaatttagaattttttccatccctgctcattataattcttattttaaattagttttaaaaaaatcctcaaaaatgttctgacgcttccttaataatttgggagggaaaaatgaaaaacaaaattctgatcaatgttttattgcaactggtatagttaaaaatgtaacatatctcaggaaggccccatggacaggccgaaattgatgctttgaacaactctttttgacagggttgtttcttaaatgaccaagcatgaaagaaaatcaaagaaacttcataatcatgcaaaatctcaccctgaaatattctggacaaatcgattccaatcaaggatgcagaaagttccaagctttctcctacgtagaattggctttcctcatttttacccaaatttccaaatactttcccctaaaaactagacaaaaaaatttcaactcaaaaacattgtcaaacaaaaatttaagaaaatgcaacaaccttccccaattttatcccattaccacaggttaaccccatttcacatgaccgggccatttgcatggttggaaagtttctgcacccctaatccgagtgaagcctattggataacaccactaaaaattgacgtatttagtcagcaaaaaattgcaggttgaaatagtttttatttaaatggtaatgacttttctttgcagattgatgatattgattttttgcagagaagcaggatgaactaaaaaaataaagattacatcagtacataaaataacttctgaaacttaacacagagttgggcttttgtaaaacaacattatcaaagcaacaattctttcaaaatgataattacagatttacaaataaaatgaacatcaaaagcgat

SEQ ID NO: 13 - DNA, 23845 bp, Bemisia tabaci
  source 1..23845: mol_type = genomic DNA
gtttacgatcgtgtctgcgattttgttcaatgtgtaccggcttcttttttccagttttatttggaattcttccgtcaagtgatgtgttaaccttttagtttttatttctgagctgtattaaaatcacagcacaatgacagaagacaaaccggataaggacaagaccgagaaaacggaagtggtaagaacctaacctctagctctcatgacttatctgtctctcaattcaataattatttttcttcgtttgacgtagttactgccacagaatcacagagttttcatcgaagtgattctgtgtggataccgaaatttctgatttccacccaaggctgattctgcgcagcactcttgtgttactttcaaacattggagaccatcggtttccgctgtgaaggctcatctatacagcctgcaaagccactgggcaagcctcatttcaaatatgtcattatttgccacttacagcgagcgctgattacgcaggtctaagcaggcttggtaggccgtgtgaatggcccgtaacgcatttgcctcattgacgagtatactcgtcagcatgctcgagggacgtatctcagttgatgagttaattggcagcatctattggcgttgctatgcaattgctttggtcatattttttcgcctttccgatagatggcatctcaagcgtcgcaacgctgactgatagtgccagttaacttgtcagtaaactcgtcatgtaaggcgaataggtgaataattcttagcaagtcagcaaaatgggaacttcaggtatggaatgaaatgattacaacattgcattaaggaggtacatctcccgactttgacctgaacactagccattgcaagcattctattaatttagagagatgcgtcttgaatttgaatcgtgcgctacacctataatgagacaattttgttgtattttttcttatctgaaaagtatgcaaggtattggtacttagaaatttctgctcctacaatccttaaattttaaactaaatttatgttacttgcaaaatcaatatcaatgttgaagagaatcatcacagccaatgactgtatatttctgtgaaagcaaaaggccaacacacggaacatgatgtgtaatgatgcagtccaatgggatgttcttgaaattcaataattttgtgtgtcctcgcaatgattctattctttatgcagagcaatcccagctggtaggatttggaaaattcaccacatttgaaacatcaatgtacctagacttatcatcaggtaatcatttattttattttatttatttgtttatttaactggatgtatcaggagacccgactgatgacgaataattatgtactttttctattaaattttgcagtacgtagtaattttacgtcagttattccttttcttttaagtttctgttaccctgccattttttattctttcaggaatggggaagtgaaaaactatgccaagcgcaggcagcgatcaatgaaaatccttgggatattgaatcttggggtattttgatacgagaagcccaaaccagatggattcatgatgtacgccctttctttgagcaacttgtcaacacttttccaacaaccgggcgttactggaaaatttacattgaacaagaggtaaacacctaatgctcttttcacaatcaaatcctcactgtcaaatcatacaaacaaattttcttttctaaagatggctctagtcgaaaatggctgatctcttctgcttaggcaaaaaatgtaatcacccatgctataatttcgtttttaaaagaaaattagccaactgaaatatctcctgaattttcctgtgaatatcattcagtaaattaatttaaattatcgacagacaatttcaaggacatttttgggttggtttagcctcttaatatgagaaaaataaaatataatataaatggaaacttgcaaagttgcagtcatggatccaaattctttgactgcagccatcaaaatatatcggcaatatatcagtgaatattcggttaaagtctggaagatgcatgcttcaccatttttgcaagtggataattcgattttcaacgcatcaagcttgacatccagttgtctcctttctttctttactttggtccagaaatgagcctgtctgggacgttacggaattgatattaagtcccaattttttttttcaaatttaatgcagccttatataatttgatttaaatttttagtcctattttaaaatcatgccaattccagtgcatctcattagtcactttttttagtgaattttttttgaagtggatttaactaaagcacttggatgtgagagtatcgccatgagagagctgcttttaattggctcctccatctcaggttttcgtggagatcttaggacccaaaaatgcggattttggaagcagatctgggctagattaatcgagaatatgatttaattcttcaatcctttaatctccataaaatttgcctgaagcatgtaaatttactggtttctacttattgaatcaaattttagcattacaattaaaaaactactcacctataccattgtcaagttttgtgaaaatattggcatcaggtgggaaccttcaaaggttagcccccctctacctaatccaatgatgctgtcagctgtcatgtttgggtcctaaggcctccataagcaagtaaaaggccgggcaaaacggcgatactctcactataaagtcactctaaatttgactcaaaatttatcgttgcttgcttgttccagatgagaggcagaaattttgaaaaagttgaaaaggtaagcaaaattagatttttctaagattgatacaaaatcaaagaactgatgattcttcaggaaatctgtcgaaagttactggcaaggttacaaaaaaggacttctgtagaagactaatcttccagtctgcagatcacggcaaacgttttgctaatcttgggtggcgggtcaattttcaagtactaagaccgaatttcacttttttctgggaaattaattctcttgtcacaaaattgaatctttcttactgaagaaatcggaattttagctgtgatgcatgaacagaagattgtgagaactattcagcgttctggaacttttgtgccaaagaaatttaaggctggactgtgcttaatcaatatctgcatctgtaatttcatgcggtaaagtcattttacggaaacctagggcaagtaacctgaggtgacccctaacatgatacctaagtaaagaaaaaaatgaagttttctgcaatttcttcaatttttctcgctgatgtaggccttttgaaacgcacctggggggaaagggatgcttgcttgcccctgccccctaccaaatgaagctgctgatttcatgtaattaatcttaaaatcttttcattgcactcattacaatttttccatggtgttgtcattcatcaatagaccatcatcgtagtgatcaacaacaaatggatataaaaattgcacattggtgaggacccaagattccatgtgcaggtgtggggggtcccctttaccctcagcaaaaacgctgaatttcaagtactggaatctgtaggaatgaaaataaattttttttgcgcatctgcagaaagtttaacatccccttgcagaattttcaattgatgtgtgctttaattttgatgtttctctctttcaatagctttttcaaagatgcctaatcaaggttttgaacatcgatctgtggaagctatatctcgattatgtcaaaggaacaaaagcaagtttagcaacttacaagtaagacctcaatagtcctttcacttttctgcctttaatacagaaaattttaccgatttatgtcctgctttctattgaaggctattttttataattttgtaatgcactcctatttgtgcagccactaaatacagaagttttgctgcgcttggaccttagaattataatttttagttttaaattctctaaccaaagtcttaaggtgtagcaaacaatcattaaaccaaaaaattatatcatgatatgcatcaagaatgaaattgcgatagaaaacaatatatcgaaggtggagcttccaaactgcgtatctcgtttacggtgtttaaaaatttttactcctattttatttttataaggaaaaacaaatcaacattattccttaaagtttctttggtattagcctcacaaagaagagaaagaccatggaagtttttaagcattgacgctcagtagctctctacttaaaaagttaagtatgacaggaagtccgcaactttgcaaacctggtttagtaattctaaactattttttaaaaactagcctagcaaattatccacaccgacatttgtcagtcatcatttggcatacttgatgctcaactagttgctcaataatcataactaggcaaaaagtagtgctgacctctgagcttagtcttgcctcacctgattacattgcccacatttttagtgcaaggcttctaaaatatattgtctccaactgatattaacagcattttttcgaccatcagtgtcaaattttagaatttcatatattcattcaagaggagtgggtaaaatgatggtcaccaattttccaactaaaatattgtcagcagcggctcatattactctgaaggtttttttgctgacagctttcactctcagaaactcttgcatgtttggtgagaaataatctaaatatttctgccgatattagaaggcacagcacagcaggaatatgacttgtgctgtattggagtattgaacgaaaatcttataaatatatgtaagagtaagttcagttgttaactgttaatccttgggcgttgacattgactttgactcatttgtcaagagcatattgcagattagtaaaccgtgtgtgccatgttaaaccgtaacatttttcaaactctggtaaaggaaaggtaaaagcttttttcaattggtcttctctcctctgagttctgtgtgcacctttttactttaaaacaatattgtctttcagtcttgactaaaatttaattcttaacaactcatctgatactgtctgctttttctttttaccctaacaattgtgaaaactttcaagtttccgttcttactttttctgaattcatcaataaagtatattctgaactttttccagagaaaaaatggctcaagcgtatgattttgcccttgataaaataggaatggatatcaactcctttgatatttggaatgattacgtaaactttctcaaaagtgtagaagccattggatcttatgctgagaaccaaaaaattactgcttgtaggaaggtgagttaataaaataatttttacaaaactgtttctgttatcaaaatatacttaaaatagagactcttgttcttaatggcacatgagactttcaatctctgcccgttttcttatattatttgactttaaggagaccaggctgtcgcaatagcaaagcaccagcggaaaatatatttcaaagcataagaagctcagaacactctttttcagcagagaaaggaaaattaaagccatagtaacaaggggaatttttttcatcggcctaaaaattgtgaagtcgcgtcgcctaaaacgaagtcccacagttttaaccaccttgaattcaatgtaacatagccgccttgtgttgcatgcctgtgtctactcgagactctcattctttggagcctcccttaaacacatcaaacagcaatgacatagcaaacttggttgggatgcattacctgtggttaaaattctgagtggaagaaattaaactattgcagttaaaaggatacatggattgcattttgcaaaaaggaaccaccagcattgcaatgttgctaagattgtgcaacttctttcgtcttggaggaaaaacccgattatcccttaatagtttctattttactcgctaaaaactgtgaatttaagacaaaaattaccatctaaatttcatagtttttcacaatttttgcaattttattgcaaaggatgaagttgcaatcttagcatcattgcaatgctagtggttcctttttgcaaaatgcaatccacatggtggcaagttctttatctgacattgaaaactttgtcagtgtgatattttactgttcatttatgtaaagtaaataaaaatattcgattttatttataatcatccctagaaattattcagttacaattctgcaactttaaatgtttccttttttcattccttgactgattccctctttctgacactagccgattatcatgagcttattttcaactggtgaccatcgactcaaagcagctttttccttcccggactcagttggtttttgttaagtttggagtattatccataaaatttagttcatcgaagttcggttattttcaaactccatgtttcaagtgattcagcaaaatccatttacgaatggcgtgttgacacagatctcgcttttcattgctacaggtttaccaacgaggagttgtgaatccgatgaataaaattgaagcattgtggaaggattacatagcttacgaacaagtcatcaaccctatcatagctgaaaaaatgatgatggagcgaagcagagattacatgaacgcacggcgagttgccaaggaattcgaagctatcactaagggtctcaatagaaatttgccaagcgttccaccaactggtcacatagaagagttgaaacaggtatctgactcgtcttttttatattttacctaggaggcactaaatttctgtgattttacttctctttatttctatcacttctatcaccgattataattgtcggattgatgagtaattttggttcaatctaacgaaattttattcagctaataccctagcatgaaatttttgtcatttatttttattttttaagattcacttgtgcgatgcaatcttttccattagccttgcatcaacagatccagcaaattggcagaattgtttttttccccatttaaacctatggatatgtatggattcttgaaggggccaggtgctccaataagaatcgattgtttaacctaggtttaaatgaaggaaatccggtattgccaaattgctggatccgcttctgtggccctgttttattcatagggtctttaaaatcatgaagaagtgctaaaaatacacacgaaatacatcatgggcctgttgcaaacttttgctagagctagagtgagagttgattctcatagaaaatttgtcaaaaatcatgatgagcgcattggcaaagtttggaatgcactcctaacttcacaatttgcgtgaggaatttgcgtttttttaagcttccagctttaaaaacaatactacggcacaggtgaagattttgttaaaggagtcgctccatcgtcggcaatattcatcatggccgacacgtgcgcagttccgcgcgtaattcgaggagagttcattattacccttatttttgctctagcaaaagtttgcaacaggcccattatctttgtgtgaagaaaaaatttaaaagaaacattggccctagtttctctttttgatgatttaatgatgcaagccaaaaaaatgcttcaggaaaaaatagatgctcccaactttttcaaattctgactcatcttgaagagaaagaataacgttacaggtgatttatctaacataagacaatgtacattcatagctaaagtgcaaaaccatgtattttcttggcggcgtttcaaaatctctgctaattttctacttttttgaagagaaacaagccaactttatagcttgaaattcgtgcagaatattctgctgatagtggaggaaaatcaagaaaatttttaaaaaagtattttgactggtttaaaataaagagtatgaagtatgataggaagtcctcaacatcactaacgaagataaatggtttcgcacttcggccatcgatattctacaatcaaagagcagataatctttaattatcatgcactagctgttttgtctctatatcccaatgtaaaccaaagacaatgaaagtgaagaggttttttggagattcaataatggcttttgtataacaggtagaactgtggaagaaatatatcgcatgggaaaaatcaaatccgttgcgttcagaagacactgccttagttacacgcagggtcatgtttgccttcgagcaatgtttgctgtgcatgggacaccatccagatgtgtggtatgaagcagctcagtatttagaccaaagttccaaaacactctccgagaaaggggtaaggctttgttttagtgttttcttctttttccatttggtttctagttaagactgaaggactagactgttaagactagtttgcattatgactgccaaagctgtcataatgcctgttttttcgttgggtactcctggccagaatggttatattgaccaccgttgtgtaatggagacgctgtgagtgggtcatccaaggaactgattgtagagcactggttgttttcttactgttagaaagctttagtgttggagcaatcagtagaaactgaagcgttaaaatctggctgtagctttctgtgtttttctggccctacaagaacaattttagatcaaactgttggcagtgaatgtgttaaaaaagtaactcttcctatagaagtttggaaatcctctctattctaataaaagcatttttaagacgttcgatgggcggggtgaggaaggagagaaagacggtcccaaggttgaatttgcccaaattctaaaattccctttttttgatcgtctctatagtattcatcctgtcttgagtcacaaaattgttgaagtattgaaattcaatgctgtacagggtgtcccaaagttaagatgagtaccctctctattctaataaaatgatttttaagatgctcgatggacggggtgaggaaggagagcatggcagtctataggtcaaattccaaagaaggaatcaaaattcagagtaaggaaaaaaccattaagaatattatttggcgggaaatttgtctttgaaacatcgtgctgttattaaattaaaattatttgctccttaaccgccaacaggcgatttcgccggccgcttagccgccagggggcggactccctaattttatttactattcctttgacagtgatctggaaacagctgaaaaaactatcacaggctctttcagaaaaaacaaacccacagcatctaaagcacagagttcaattatcagttttcccaaaactttttattatttttaggaatgaaaatatttcttgaagtttcctccaatgaactcctagagagagtacaaaattgagcaccactaacttgtttcgatataacaattttatgtggaaaacgatgaatgcattaagactttctaaatgtaattaataaaacaccaagttacacttaaaggttaacaaatatctgtgtttgtctctatcaattcacacttcttgctcacaaaaaaacttgagtctactcaagtcaaattgagcactaaatggactatacatatattgaactgttgatgaactttcctacatcgtaactttttttaaagtttcatagtattttcttaaatcagaggctaggtgaatggggttttgaccctggtcaaaagttagaagaaaaagaagaagtagtagtaacttttttttgacaagcttatgggtgcctagtatcaatagaggaaggaagtctgtttgcaatcatgctccagttattcgcctcatgtataggttgatttcaatgcctattttggcttgcaccgattgtggtcttttttgagcaggaaatttgaatttactatttataacattaactactttgctggtttctctctcatttgacggaggttttcaaaatgttaggcctgttttgcacaaaatttcgactagaactgcaccaatagtgcctacctcgtctagcgatcaattcagcatgttgatggccaaagtgcaaaacaacgtatcttcaattcaaaaatttctgcttctattttatttgttcaaagagaaacgagctaactttattgtttgaaatttttacagaatattctgcccacagagaagaaagatcgggagagttttcaagaaattattttgactagtttttttctaaagaaaaataaagtaagacaggaagtctgcatagtctcaaatggagatgtgtggttttgcacttaggccatcaatgtgcttttgagtcttccctgatgttatgtcatacattcaatactgataaataggaactctcaaccgacctattctacctttgtttgttggtgcaggaaatgtatttttgacaaactcccagaaattttttctcacattcaaaatttgaaaagagtagcaaacaatcgcctgtattgtgtataccagaaacatcgttgtgcctttcctccaagatttttacttattttctttttttacactttcccaggatgtgaatgcatcaaaactatttagcgatgaagctgcaacaatttttgaccgagcaacatcaactattttaaagcatagtatgctcctccactttgcgtatgccgattttgaggaaggcaggatgaagtatgagaaagtgcatgaaatttacaaaacgtatctggaactgcaggaaatagatcctactcttgtaagtaaatcttggtaaagacgttttacatattgaatgacaaactgattgcagtagacgcacgagtggaaagacagtaagttggaattttttagccaacctatgttaaaaatcagcacaaagctgaaaatctcaatacagagggaaaaagcttatatgagcacaattttccctcaaagagacatgctgtttggtacaacactagtaatgatggcaaaccaaacatcgtatctctttgagtgaaaatcgtgctcatatgagctttttccttctatattgagattttcagcttcatgctaatttttaaggcaagttcgctaaaaaattccaacttactttatttgaatgaaccgtctttttatatctattgaatatatttccaatatttaattctttgcaattttatgtagaatgttttacttaatttcgccaatcagcgccaataattattgattagaactttccattatttggatcgaatttaaccgaaacacaccaagtcgcattttggggaaaaatgagttagtaatagtttcgaatttaactagttctaaatttttggaatagttttgtatctaaccattcctaactttcctcttgtcaaaaattctatgtcgagaaaaaatgaaagaatttggaacgtgaaaatagtgatgaagttttgtccttaacattgagtcttatggaggaatgaaacttcaaacctctttccttggttccaacttaatgtgactcgatgtatttccattgaacttcattcatttgtggctggcgacggggaagaaactctcggtgcatggaaaaaatatttttaacagaataattcatacccagttgggcggaagaatcgaaacttgagtcaatgatcaatgatgttctgtagtgcctacctcatgaataaaatggctgtttttagttttgtgtcaatagaatacacaaaaactcatcttaatttaagtaatttgagtctggaacatgatagataaaaactttccatatcaatttttcaaaatttcggtttttgaattttaaactttcaatggttgaaattccagcttagtttagcggttttggatgtttttggctcgtgtaatcttagaccatcattcttcattatggcgaaaaaaaattgaaatttttgtaaaaaatgacctgtgctaaattctccagcggccattaatgtttcaactaaacaaaaaaagtaaatgaagtatagtttctcaaggtaaatgaaatgttcagtaattcttgaatcttgtgtattcaataagtagccagtgattttagtccataagaattttcttggattttttgaaggatatgaacccacagaaaacaagttcaaagctgcatatgttgagcctttatttgcagacacactgctgataaagccaaggtgggatccaaaaatattcatcctatctcaggtacactttccgtaggataacacctcagctgcaatgaggagaaattttttctcagggaagtgggtaaaaagcgcaatccactaaagtgcggaatgtgcgagcctttactgtttatgttgctatctgttgctaaaatgttatctgttgtgaattttacgcagacttatgtgcagtatatgaaatttgctagaagagcagaaggaattaagtcagccagatcggtgtttcggaaagcaagggaggacccccgttccaattaccaggtttgtgcatctttttcacaattttcagagagcaattttcaatgaagttttatcagccaatccagagatactgaggttattttaaaaacttttgcctgagccaaggaaaaaaagtcacgtgaaatcctggaaaaattagaatgagagcagtggaaacacctataattcactgtttttctccagtttgggtaggaaattttgcatttagcagctttctttaaaataatgtagaaatagtgaaaaaattatatgaaacaaaatgacctgcagttggtcgtcagtcagcatagttcttaaataaaaataaaccgcaaaaatatatatcctggtcaaacacttacataagtatatgtttctactttttcaagtaacatttaactagaagtggtgtcattgtcatttgttttcatttaagaaactacctgggggggaaaaaatcgttatcttgcgttagtgtgttgttgtataaacgaaagtgactctttcttatcgaattgcatccttgtcgaagtatactgagagagattgaagggtaaatgcctcaatttttcactaatttgtaggtgaaaaagtgtgtaatggatttcgctaacatgctcatcaggatttctgaacagtgttatataagaaactaactccgtttgtagctctaatgcaagtttacagcaggctacaaaaatgtgtttttagtttttccaccataagtaactttgaaaatcagctggcacaacattttcttgaaattgaaaaaaaaaaattcattatgtcaattgaaaaatgtatcatctcttagcaatttttttttgtgtaccatgagaaaataaaattacatatattttcatttttaagcttaattttttcgtaaatatgttttactaaattagcatataaatgaggaaaaaaaacactaaaaagtggcccgaactatatgtaacaaggtggagaaatggtgctgggtccacaacatttcacggggaaattaaagccaaaaagttccaaaaattataattagagtcaaaaataaattttttaactctaatgagcaacttttttttaacttttcaaactgcctgagctgaacactctcccccctcagtttgtactggtactcattagagttgaaacattttatttttgactaattataatttttggaacttcttggctttgatttccccgcgaaatggtgtggacacagtaccatttctccaccttcctagtatgtaaatttgaccggaaattatttgtgccttggcattccttcttgctcgcatgcatttttttgaagaatttcttctgtttcagctatttaaatcaatgaagtcctttcacgcttgaacagaaaaactgactgtcttcagtaatttcattcttgatgtgttaatgttttggacgttttgttggcagattttcgtggcagcagccttgatggagtattattgtagtaaagataaaaatattgcatttaggatttttgaattaggactgaaaaagttctctcacacgccagaatacctgttgtgttacatagactacttatcacatttgaacgaagataacaacacacgagtgctctttgaacgtgtcctctcatcgggtagtcttgagtctgaaaaatctgtgtaagtgttggcttttgcaatctttagttcaattttcactggacaatattcttcctattttgttatataggtatttcaaattcgcacaaaagagtttaccatggaggttttggcatacattatccctttataacactatcacggcacaatatcattcctctcatcatataacagaccataacactttaccagtacactacagacaaactaatatataaggagagggttaaatcatatttttgaaaggactctattgtcctgacataaatcctgcaaattatccaacgtctttgtttgtgtcagcgctgaaggtagtctcttgggctgccatcttggaaatgaaatcattctgctgcaccacaagctgccggctgattttcaaaattttggatttgtcaattagctaagaccagtccaaaaaagaatgtaaccaagaagtaattcaaccctgggaaaaactgcactgaacagaagataggaattaatgggcctgttacaaacttttgctagagcaaaactaagagttgtttcttacagataatgcctcaaaaatcacgatgagcgtatcggcaaagtctgaaatgcacccataacttcacaatctgcgtaagaaatttgcggttttttgagcttcccgcttcgaaaacgatactacggcacaggtgaatattttgttagaggagtcgctccattggcggcaatactcatcatggccgacgccagtccgccaaaacatgtgtgatgggacgagataacacctgaacaggattaaaccagatgacaatcggcgtgtttacgttcatattttcctcgcctgccttaattgaccttgaactctcctcgaattacgcgaggaactgcgcaagcgtcggccatgatgaatattgccgacgatggagcgactcctctaacaaaatgttcacctgtgcagtagtatcgtttttgaagcgggaagctcaaaataacgcaaatttcttacgcagattgtgaatttatgggtgcatttcagactctgccgatacgctcatcgtgatttttgaggcattatctataggaaacaactcttcattctgccccagcaaaaaattgcaacaggcccattgaaaaacctggctgtttcaaaatattaaaatttcatttttaactggtgaaattgaaaaaaaatccgctgtaattgaaaggccgagacttaaccaacaagtgttgaaactgaccgcctatgaactctttttcatctgagttttgtcttgttcaatcgacaagtacaaaattgttgcaaggtcaagcagctgtgtgcagcttaaaatctttgggtgcggtacttgaaagccgtttatagcctgtaaatattccataaaaattactcatctttcaattgcaaagtatgaattgcaaatttttaaatttcacaaaaactcatgtttaacccattgacttaaaacatttaagacgttgcttgacttgacatcaatgtttacgatatcccaacatgttaatgaaaagttgcgttcttgtcagtgtttgtattagtagcactgtatcgtggctttggtcattcaacatttccctctttcatttggtgatgaattttaatcggtggtcttttttctaattttttttcagtgaaatttggaataggttcttagaattcgagtccaacataggtgatttaagtagtattgtaaaagttgaaaaaagaaggagtgctgttttgagtaaggtaaaaagaaacttttacatcagtacgttgcatgttcatttccttttagactttaaatttagctattgtaattagaaattatcttcagcttagtccaccacagaaaaagcagaattgttttttcaacttaacaggtgtacagtagaaaacatttcattcaaaattttttatcgttaaactgtcattttccagacaaaaaactgcaattaaagttcaatgctacaaaatgttcactagtaaatcgtacttttttcaggaaatggttaacagttgcaactcaaattttcaccgatttatcctctgatcatacttaaaaatcagcaagattttagacagaaaatgttcggcacattaatgtataaattgaattttttttggacaaatttgcaaccttagaatgaagctatatggtcctttgtctgaaaattgatggatttagatgaaaattaatgctttccttggccaggctcaaaagttgtgctgtagatctaaaggaacaaatgttctttctcaggatgtgtaagtactgtacagaaaaagtacaaacacatcgaaaaagagacaaggatttttacacaacgtcatagccacggtgcttagtttgtaaaaatagaaatgctcactgcaacggaaaaagactcatgtagggtaaatttgccctaaaagaattatgttgatatgctgtctctaaactttactccacataacctccaattaaccaacaaaaacacaccgccaatgcgacgctgccgtgtattcttccactacgcattccgccgccatattgatcgtgacgtgtacattcgaaacctacgagcgcgcggttcaaacgctgttttaggccaccccaatttttggcactttcaaatatttttttcttccgtttgcagttatcaaaaaaaaatcaggaaaaaaactgtaagctttggttacttactacgttcgaatgacacaataaaaaaaaaatgacttaactgactcattctgaccaatttttattagattcataatatagtatgggctgaaaaacagttttaaatgccaatggccactgttccttgagattttcagccgaggtttagtctgaacaatcatggcagtggataattgctccctgaacaaatcgtcgctcattttgaactgtttttttttactgtgcactctccatttttccagattgcagagttcgaaggtaaagaaaccgcccagttggttgataggtacaagttcctgaacctgttcccttgcacccctgcagagttaaagtgagtaactccttgatttaagatcttttttcctgtatatctcagtgcagttattagtttgacgttttgaacaacaaattttgcctgaagtccatttcaaatcatgtctttttaatcatctgacatatcttccaaaaaaaaaagacagtcatggttttcctgcaatacgtgaaagtactgttgcctaatattttatactttcccaaaatacttcataattctccttctttctttttgatatccgcccactgggtacagagttttttaagaactgcttaaggacaggtatcattgcatttgttactgattttgtattttgcctcaatttgacatgttcgaaaagatattttaaagagaagaaaataaggccctatgaaaggcctgtacataacgtaggctgagccctagaacagggtattttgtctttaaaggcgtctctgtgtcatcttggggtaagtacttagtttttgaggtaggctcagaagtatttaaaaaataaaatttttttagactttcctgaaaggtatggaatactatgtattatatatctttagaaaatctgtataaaaaatcttcagaaaatagctgcctgcaaattgtggcaaaaagccatgcttgttaaaaagaaattcatctgtaatattttcactattgatgcttttagaagcactgttaggagactaattatactaattttcttaattttagagcaataggctacaatgaagtcactcaaaatatagccaagtcattccaagctgccaagtctggcgggccgatcatctccagcctggacgtgatggatgacggagatgcagctcagagaaatctcccgaagccagacgtatcacaaatgattccatataagcctaaacgaaatgcattcatcggtgaacatcctatcccaggtaaggttcatgcagagctcatagaaactggaaaaatgtagggactttaatttgttgaacagggttgccagccagggaagagcaagaaatgtcagggaattttgaaaagtcccaggagacctgaaaatgtcaaggaaaatttcaaaagtgtcagcaaaaaattgttaagtcacctttaacgggtcagttatgctggtcatagaatcgtgttttgatgattaactcttttagattcgctaaaagtaatgagtcgtccaaacagcaactttatatgttgaatattaaccgagatatcgcgcgttaaaaagttaggtttttgacatcatctactgcggtaagaacacccctggtttcttccactttgctttcatcagacatttctgttgagtaaccagtgcaaatgtgcgtcacgctgactgatgcaagcaacataaactgattgtggtagacgcactcgtacggcagtatgttgttataatcagctttatgctgaatttttaatgcttattggctaaaaactccaacatactgatgaaagcaaggtggaagaaaccaagggtgtcactaccgcagtggatgacgtcaaaaatccgacctttcaaagagtgatatctcggtgaatattgaatgtggaaagttgccgttcggacagatcttgttagttttagctagtctaaaagaatcaatcatcaaaacccaattatgtaaccagcgcaactgagccattgctttttataatgattttgaagttttgaacaacaaattttgcctgaaatctattttgagctatgtctttttaaccatctgaaatatcctcagtcgtcagggaattttacggaaatgtgttggggaaaccaggaaaatgttaggaaaattcatttttcaaattctgtggcaatcttggttgaaaatgctagaaattaggtgtttaactctggaaaccacagggattttggcgttctataatagtgatggaactggttttttgcaagaagagtttattaaaaattaatttggcagatattgtaagaaccaaagttcaaatattaaattttgactgttcttttttccttttcttttcttttcttgctgtgtggcggtgtccctgtataggaaatttgggcttaatgtggcaattttgtaacaatgaaatctctggtggctgttattcttattttttgttcaaaattactatatacaaattattcattttttatccatcatcttgtcttggaagttattacgcctcatcaagaagcctagttgtatatcgtatatttttctgtaggtggcagcttccctccacctcctgccgttgctcaactaatggccactttgccaccccctggttgttttcatggaccatttgttgctgtggatcagcttctggagatatttgataaaatccaaattccagataaacgtaagtccccttcgaattatttgttacattttctgttagttctactctcacagttgtacctacagtcaactttcaatattcaaaggaccggagaaaattcaaagtaatgaggtttccaaatttaagaggttttgaagagattcaaattaaagattcattcacaaattctgttacccaatttacctactataatgaatgtaaagtgctgggcatagtgcttttccagttaactgagtgccttttcctcaatgacctgctagaatttttaaattgaagaaagtcctgttgtaaaatttcaaattaccaagggtaatttgtctatgcttagctctgaaaaattcaaattattgttgagagaaagacttgtcaatttttttcgaattaatcaagcttttttgaaggatccagcactgtactttgtattaatgatagtttcaaattattgagagttgacttatttgaaatttatttttttattgagctttgtgcgagaagagtgacacaagagtcattgaaaatttttgaactttttttttaatattcaagcttttgaataccctttttgggacaattgctttcatgtcctaaaaagccttttaatttcaccttatctggtaattttgttcaaaagatcgttcttcgctcttatgccaccagcactttaaaactatagcattgtgacgtctgtttgtctcttcatttagatagtggcaagttttggaagaaaattatttggttttgtaggcactctctaaagtctctaaaatgttgcttgtatttctttgaaaatttttacagaatttgtggcatgtctttgatctcaaaaactagtactcttttaacagtcctttcttcttgattttgaaagttagtcaccaatcatttgcaaacatcatttgatttcctgtgacagagaattatttggtaccactgtcggcttctcagttcagaacaaagcgcctagaacataaaagctgggaaatgctgagattcatcgcagatacaaacaatatctgtgagcaatcaagtaattgaattacattttgcaacaaggaaccactatttttggcccattttagaaacaacatgcatgccattgatttccttatgcagatatgtgcttctatgggagagccaaagatagtggttccatattgcaaaatataatccaattcatacaggaatttatgttgaaaatcgaaaatttctctttctgcaccaaaatagccttgcttccaattccgactgtcactgatggcttagcgccaaattaatcaataaagaagtaaaatttcaatagtttgctgtgagctacagggattattctaatttttccctcaaggataagcaggaaaatgaaaaaagtcatcgagtttctcagcaggtaatgagattgtcttctgcagatcaggaagaaatcagggaatgagaaaagtacagatttgtggacaccatattttactcttagaatacaggttcgagctgattccctgcaataggattttcagcaaaaactttcaaggagctgtaattttcttgagtttttcctgctccagtctcgcacagacataatattcaatttgtgaagacacatctattcatttccttttttttttacagctcctgttccaaaaggtgacaacggttgtgatactcggttatttgacttcaccagctctatccactggatggagaacgatgattcagtcttaaacagtgggatcaggaggaaacggaaagcaggaggaggggatgaaagtgatgaagaagaaaacgtcgctccacctgtctacgacatttatagaataagacagcaaaaacgagtcaaatgatctttcatttatcgcagtgacactgctttcagttgatcaaatcgtaatatctctgacttgctctgtagcgaatgctgttggacacaaattttaagtctgatgtgccattatattttgtattgcgtcttctacgtaatggtaccattggacaatatggtaaactcccatgttggatacatgaagagtctcctacctagtttagggggttgaaaacctgatcttaaattgttgctcctctgatgtaaggcgaatctccttttttacacaagctttgaacagcatggaatcgtaaatcagactgttacatcagaggagcgataaaacatgtcattaaattcagttcggtaatccaccatatccagagaaataaatttgggttctttgttaatatatctgttttccagatcatgagcccatgtaaatctaaatttttagttgtttcagccaagtttcaacaggcctaataattggagaatgttggcctaatcagtaaaaggaccactaaacagggtatgaaattatgcaccagaatacatataaaatacaatggacacatcaaaattttccaaattctactcataagtgagaaaataacagctcctgtctacatttgtttactatgtctgttcacaaacaaaccagagtctagtagaataaaattgtgcactgaattaatttcgacgtatcatcaccttccaggcaaagtatcacaagcgccatgcgacatttaaaaatttccgccgccattttatttctttactgagaaattgttggttgaatctgtttggaaatttcattaaattttatcagcagcacaaagctaattcagtgaaatttttggacagcttcgttgaacaatttctctgtaaaaaaatataatggcagcggaattttttaaacgtcgcatggcgcttgtgatactttgcctggaaggtgacgatatggtgatggaagaatttttctctctattaaatttttgtcaacagcattaaagatatcttgtatcaagcaaagaaagagatgtttgtgaaactaggctccagtttttgcttaatgtatcagtggatttcaatgtctaatagggcctttgttgataacggttttttcgcgagaaggaagtttgaatcaagtgcttacatttactactcacgtatgagttaatttcgaaggttttaatggtgctctgcctaaaattctgatgaattcacatgctttgtaatgctgtattcttcaccctgtctagtggtccatcgcagaaatgtaggcataatcagaaaattgaaaaagaagtacacttacaataccaagaaatattttgttggcttgtaaataatattggataagatgtccctcacaacttttccagcatgatgagctttttaattgtactttctgtgtgccaatctcgagaaaagctggggtgaaaagtgaatttttatactttctcatcatatgtatgtcgtttccaatggaggtatgggattgtgaccatgtctgtgtgaatgctatactgcacgctgttatcatttggaggactttccttcttttgtcagtcttatcctcctagccagtgaggaaacaatagctcctttcgatcacttatgagatactttaacattaccaccagatacagcaagtaattataccaaaaaaatttacttttcagccctgcttttctcaagattggcacataggaagttcgattttagaagctcatccaaaggctcaggagactgtaaggaacaaattaccaaattaagtataaatttagctggcactgaatttcttggtattgtgtgcatagttctttgcttttcatcgtccgctacttttattgaattaaaatcagctctgtaagttcctcgtgttaccattttactgaaaatgctagattttttatcttcctcttgtttctttgaagattttcaaagttaggttttgttttagtaatatctgttaaatgtccaagtttcctaaattttcaattagtaaaagccctctttgatttttacaccatgttcaaggattttttaacccttaatccaaagagagggaatcagattttaattttaatcaaaaatatgcatgatgagtgtgcatgatttaatgcaatctaagaactctgagaagtagtgaaactacttttttatttctaaagtcaattactttgtcagtcacttgtcacgttgtatacaatcatttactttttaagaacaaacactctctgttattgtttgcaacctttttgttttttaactcccagaaattcttgccaagtattcagtgggatcatacaaagataataaaagctgcaatcctggtcttgataaagttacagtctttttcttgaattctgtgaagtaaacaaaatctcatgccaacacattttttcttctttcctactgctgacatttttatagcaggtgaggactgattccaagccagaagattttgaaataaaccccttaaaatatgtataattcgcactataaaattttgcaaataattaaattctggttgctcgagaaaatacatgaaggaactctttgaaaccttactcgaataaatgaataagaggtccaagttttgagttacattgaattcagtacatacaatctacccatgtgagttgagcttttctgaagtgatagatgaaaatcctgtaatatttctcatcaatctaaaaattattctttttactgtaaattttctctgtatctatttcattttgaaaaaaaatactaaataaaaaagatgtggttagtctgata

SEQ ID NO: 14 - DNA, 27616 bp, Bemisia tabaci
  source 1..27616: mol_type = genomic DNA
ggtaaaacaaacaaacgtctggtcgttctcacctgtctgttaaaattaatattgtgaaatttctgtttaccgcagtgattgtgaatagtgaaccccaatcatcaagatggctttgaaaacgctcgtcgggcaaagtaagaaactttttcctccgttcctctgtatcttgtatccaagttgatggttagaactctgccctagttgctcatcccttatcattcatggcaacttctcattatttagtctcactacttcttttttcattgaatcaatgtgaatcatggtataaatacggctgatacgaagtgtgtctgaatggtattttaaatctgcattcatgtaggtcaggttttctctactctgcttacggacctagtttgacggacaacctgtctctatcgtaagcttcaaagagaatcttacttaactggagagcaaagcacacaaactcaaccacatatatgttgaggggtttgatgtatggcctctttcggatgagtttgtgaattgttggttgaaattaaagggctgttacatagcttgcgctgttttcaaaggaccaacgtcaaggagaatcaaagcaagcacttagatagtgtcctattgtagaaacagatcgggttttataaggccctaatggttgctcaatcaatgttgaagtaagtacaagaaggagagtattgggatatctagtaggtttcccttctaaactaagtatgtaagattttaccttgcaaaaactacgtgaagtgaacttttaaccactgataggctgacacaatcgttaaatcttcataattccaaccttactgcagattaggtgtaggagtattacctatactctttgcacacaaacaattttgaatgcgtgacccatgagctgtggtccattttcagtttttaaacatggaaactgtatatcgacagtgtaagtccgcaacaacgtatcttgtttgtggtgaccgaaaatctccgcctcgatattatttggttaaaggagaacaaatcgatatcattccttattgtctttgctcagaggagaaaaatcacggcagttttaaagaattcccattgagtagttttccgtttaaaaaatgaagtatgacaggaagtctaaatgacaatgccgagatacgaagttgcggactaacactgtctatatcttggtttgctacattcaatcagaaaacttttttcaatttttgaaaaaggtgaagatttttttttctctttgaaaaatagtcagtgagtaatgaagttcacttgcattccgacaaaaatttaaaatgagactacactcataatatacagttttcaagattggtcatcgatttgtgggatatatgctcagttttaaatactcaaaagactgcaaagatctatctcaatttttctagccgtattgcatcggtctttcatcatcatatccatggtgaaagcaccgaattaggtatctcggttctcaattcgcaaatctctcgatatgtttcagttttctaatgatgacaagattcatattgtcacacaatttttgaacactctcctttattctttcagcattttccaggtgcccgcttgaggggaaaaatgttacactatgacatagctgaaaggaatcgagttgcatcagccatctccaaagttcatcagatgatctaatttttaatggagaacaatagtgcagactcttttaaaactgtctgagaatttcctgtgacattatgcaaattttctgaaatttccaaaggaatctgctctcctgtaaaagcataaaacggaccgcatttaggagaaaggaaccaaaccacatccgctcttgccaattttaatgaggcaatttaatttttttcaagagaacgtttcagcgaatttcgaaaattttccgatatttgcctcgtacttggcaaaaaaaatccgcacaaccgtattcatgcaaaaaattatattgtctgattaaatttggcaatagctgatgtggcttggttcctttctgcctttctgcttaacacagtccaattgttcaatgaaatttggcagtggctgatgctgatattacttggatcctctctgcttattgcagtccattttttatctcatctataagaatagttactcctacctaaaatatagagagtctacaaacaatgtctaggatgtgagaatttggtttaatgtttgtttataatttttagccatatggtgtgactagactcaaaatgattttcctcattttcaatcattctgttttgattttcaattatttcaaagtttttccaaggggctttattagtcctctaacaattatttttctagaaatcttgctataattctaatgaaatacgtatacttaactatgaaatacaatttttccacactcttttaatcgaaagttcaacagcacaaacaacctctcaaatttttctacctacaaaaataaatgcttggtcctcaaacattttttgttggattgatttaagtgtgaagtttcagaaatttaagacagtttttgtgatcataagttccagagtgatttatgactttttacactgttcactgtaaaagacaagatgtcactttcatttcatcagagtcaactcttgattttcacagaaagcagtaacaaaaaatctcttgcaaatatattctttcaagcctgaattctcaatttctcttaaaaagttgctgcttttaagaactattacgcctcttcagagtattaagtactccacaccttaaagtagatgatgttaatgaaagcaaaaagaatcatcaaaaatgacctctgcctcagataagatctaggtggctacatattgaatgataaaaatatggaaggtgaaaatcacaaagtttatttcaactaaaatgtacaataaaattggtggcctttaaacagtgctcttgagaagtgataaaattacttaagaaactctcccttcttcaggatttatctcactgcccaggctttaaacttggatcattttaagccaaatcttctttacaaaatcaaaatttatgaaacaactttcgtcaaacaaactctgtgaatagttgtgtagttctagcttggtctacaggtagaagtagatatgtaactaattgttgaatatctactgaaattgcctgatctcacatcaatggtcaaagtgcaaaaccatgtatctccattacgatgtttctaaatgtctgttccttttttaagataaacaagccaacgttatagtttgaaattcttgcagaatactctgttagcatagagataaattcaggaagccttcaagaaattatgttgccttagtttatcaatgaaaaaatataaaaggacagcaactacatcatcgcaaagggagttacctggttttgcactttggccatcgatattcagaaaattcaatattagataggaaattggaatatgtgtaaataagcagacattttttcaaattaacacaatagtccctaaaagaagtccacctttgaacgatatacacaatttgccgtacgaaggtcctacagcttgatttatctcattgatacactttcattgagacttcatctttttgtttgaaggttcatcctcgttttcctctccttcctcacttcggaaaataggtttgggctgcgtctgtgaataagcaggtgcaacccagtatggattttcagcagcctcttttgcatactttaaaattgcctccctaggatcttgatcatcctccacctttttactcaaacctaaatttcgaataacatatgagctgagagtgcttccacttgcagcgactcgaccgccttgaccagatttgatcggcaaatccggacgatgagatttaataggatccagtctgtctttttccatcttcttacgcatagattttgaccgctcttgtttgaaggcaggtaacgcatgaggtgtaataatctgtgttgctgcaaccacttcaacctgcttcgtcttggtccgaactttccctgcgcatagtttcgctcctcgcatacttttggcttcatcatagaatactttgacaataccatttccgcaactgacgaaaatttgatgtaaccgtggatgccacactgttttaatcacatgggcgtccgccactataatttctttgactgtctcaaacgttgtagtatcgaagaagtagagttttccttcagtttcacccttgttcaatgaaactcctgttgttaaaactgtatcgtcaggactgaatgcgcaatctgtgctgccatatcgggagaacaaatcatgtttaacttgcaaaggttttttaaatgcccgcaagtcccaaagtttcacagtatcgtctccacctcgtgatgctatccagttgtgcaagtaagcaaaagcgacacaggatgtttcacttccttgttgatgagcttcacgattatgtaatgttggacttgtgatgattctccttggatcccatagctgaattgaaccgtcaacgcatgccgcagccactaaactggcatcacgattgtaattacatgcggtggggtttgtttttagtccatttttcgaccgacatttgattatcttgaggtggttgtaaggcttatctactgtccagattcgacaagttccatcttcagcactggtcaagaattcttctcgattgcgaggatgccaacaaccagaagtcagaggtgctgtgtgtcctttagttcgcgccatatccacaacgtattggtcacctttcacacactccattatttcatggccatctctgtctagcactttagcttgtgccattcctgacactattagaacagaatcaccagtcgctgtgtaagctatggctttgattggattatttccgcatgggtaaagtgaacggaaactttgcaatgtgttgtccattccagcaaagtcccagaatttcacttggtaatcgactgaccccgaggcaagtctagccccagcagggtctatagccaaagcggcgactgcttttgagccatgattcaaagatatattcaattctgttgggataaccagtttcgtttcctcttcaccctcatcatcactaacatcactgtcactatcactgtcttttttgtcctgttcatttattttcaaggtttccaaaccactgtctccgatttccgacattgcttctctcaattatagtattattatcactgtaattaaaatttactctactgaaaaatcgatgaacgtttggtaaaacggcagatctgcactggtgtttgtttacaaatgagcataacctacatttgttatggattagcagggctaccgctacttcaaagctgaatttttatcgagacgtaattaccgtatccatcgtaccgtattattgtacgctgcatctgccaccattccacacacgtagcacaaattgcattccataaggggcgtcgagacttcgacacgactatttgtcatgttttcgaaaaattatccgttttccattattttttttattttattttatttttttcaccaccctatttatgagtagtttttatatgtgatcgtctacgggaaaagggctagcttgataggtacttccatagtatctgagcaaatgaccattatttggtttgaaatttttgggaaagtgcttcattcccaaaatgtccttgaagtactcctgtctcgagttcaaattactcaattttgagtttatgtggatgaaggtcctcttctccgcgggtggtcacaacataataagtgctctttttgatgttattttcatattttaaatattttcaacagtcatgaaaaaagaacaaaatatagtcaaggaccggggcatccccctccctcccctttctcgtatcctatttcctctcccccccttcggccctatctagggcttttccatgattatttttggaccctaatcattttaccttacgtttagtacataatccaatccagttattctatatacctctaaaattatatttttttgatgggcaagttcgcaaattttttccattgaagtacataatatgtacttacctacttattctctttcagatttttcttacggctatttcctagtcaattacttatttctcgtgacctgaaattcagaggttcattcaataaattatttactatttgcaattaatcgtacatcatatcttattccagaaattatgaatgaagctatcaagcagaagaagaagactgggaaagatgttgagtggcgggtgctagtggtcgaccagctcgccatgaggatggtctcagcttgctgtaaaatgcatgaaatctctgctgaaggaatcaccagtaagtgatgtctggactgaatattggttttgaaactagaataatacgcattgccattgcaatttttcaaaatttccgctctagctttatttttttccgaaaaaaaaagacactatctttatttttcaactgaaatattaggtaattacttgatagattaagggggaaaatgaagaattgaaaataaatgaattaaaataatatttggcagaaagtttgtaatgtttgaatttccaaagaaatttaaaattgttaagtcttgaaaattagttttaatacttgattaattctgagtaaaagtaatgaatgttttactttttcaagtttgtagagattgcctcgaagttatgtacgttaatataatttttctttaacaacagtatcatgttcagaatttcctaattatggatcatagggaaaactggaaaaatatctcctctttatttacataagcatggattgattatttttattttctgtgtaagttgagggaaaaaatcagtcccattgaggcactggatgcaaaaagggcacttctcagttgcagtgtttcagagtctcgtctaatattttattcattgtaaagaatgtgaatgaagccatttcactaaaaattttaccgaatattcctcatgctcctacaattttctatggaagaattttagaaaaattacccattaaattctcctccaagggattaattagcaacagaaattctgaaacacagcaatcgagaagtgcccttttcgcaaccagtgcctcaacgtatgtggtgtatcttctgcaaaatcaagttttatcaattttggtgcttatttttcttgcacaaacagttcgctccagttttgtgatgatctaaaattaagaaaaaatttaagttttcttagctcagaaattaatcattatttcctcttgtttttctagttgtagaagatttaaataagaagcgggagcctctaccaacaatggaagcagtttacctaattagtccttgcgagaaatcagtgcatgccctgatgaatgattttaattatggtagccgtactatgtacaaagctgctcatgtttacttcactgaaggtaaatttgttactctgattaacttgtctgtgctctggataacatttttgtgtgattaaaacgtatttcaatgcaggtacattttttcagaggaagctgaagctgccaaattttaaagtacatactttagttttgatcaaagttcccctcccacatcaggtcagtagggttgagtaatttgaccctaaactataatatttcaagattaaagtagggctccctgcaacctggaaaactgttaaggttatgaaaagccagagaatttttggtggccaggaatagtcagggaaccttgtgagtagcgcaccagctaccgaaagtccttttgaataacttttgaaataaatactgagtgtctgtctctacagttcgaatgttgtccaactttgaggaaaaatcagtgttctttttaatatggaattaatacggaagttctgtctgaaggtgaagaaaagtcagcaaatgtgaacattttggagtcaaggaacaacaagaaaaaaaattggagaaaaagcagagaaagtcagggaacccgaaaatgaagggctagtagaaactctcctgaaatgtaaatactgaaaattgtggaattaaattaatccaaatcggtacgcccgagggagaaatatttgctttcataatttcagccaaaaaatcccaagtttttttaaggtcatgcctcgaagttcacccaactaaacctttctccactctgctccctgtctgcccccaatgactttcattgagatgttaaatttccaccaaagagtagctcagatggtcaccaaataatatgagaaatttaatcagttaatgaatttgtaaaactattatatacattcaggccttttttacttttaataattgtggatttttctgaattcctcattgaaactttttccagcatctgaaaacgaagaatttctaccagacatcccaggatttgaagacaatgtatttttttctgattgttttcatttagcaagaaggaatttttatagctgtagttagttaagtcagggcgggtttgaaggaaaataatccaagaattactgataatagtcttaaaaattcacactgcgacgccagaaaagcgagcttataaaccttccagccattttttttttaaatacaaaaaaagaaatcaattttctaaaatatcagattactattaaattaaatctggataatgattcacaaatttcaacagagcaccaatttattgttgttttttctccgctcttaatccatgacattaatttctgctcactgctatttcagttgattccttaaggaaaatactacgatgtttttctgaaatgactttttagcactgaaactgactctgcgccaaaaatggtgacgaaagccaagctctacttttatcaagttttatttggtccttgagtacctcttatactttttatttagtcctttctgtttttgttttattatcggatgaaacctgttttgagttttattaattttgtttgtattttttgaaaaatcacttttcagcttgccaagaagagcgctttaacaaactttgccatgccccagttgccaaatatattaaaacatgtaaagaaattaatattgcatttatcgcgtatgagcagaaggtattttaatttccgtttcattttcattttccttcttttctgtttgtctttgatatatctgtcttggattaactgttccggtgtgatctcttgacgtttgaatctgttaaattaagtccctcactctaatcgttgctctggttttgtatagctgtaattatgtgtgtcagtgtaaattaaatgtttctccaaatttaagggtgatcctcctccccccaccccctcatctttaaaaggaggaacacctcttattacaaaaattctgtgatcccccaactgtgaatggttcagtgttgattaatgcttaaaaaatcgtgtttagtttacaaaaattgtgtcatgatggagaaatacgagatgctgacaggaatgacaagtttcaacttcaaaaatttaagtctcaaaattcaatttcaaaactaccgtattaagaagttttgaagattctcagtcattattttaaaggaaaggctactgcttcaatcttttttcttactatacgaaccagtccttacaggaagacaacaaccaagaaaaaaacataaaaatgttcctctgacctaacatttaacatttcacatatttatttttttctttgaaaactgagggaaatcagtctccagctaaattctatgttgtgctataaaagtttctgtacaggtagttttgtcagctcagtgttgttgctacatatgcagctggcgctattctttgtgtattcatatttctcatccaagatcggctctcagtatataactctcttcacctttttcttcatggttgtattcaccggtgatgatataaagtattttggaaattctgaaatggaaagcaatatagtatgcaggaggggtatcagttttcgttatagtcaaaacaattttttttggaagtgtaatatcaatacaaggtttcatgtgttcagccaaatatttttttgtattggatggcaaccaaaattagcctaattgcacttaatgttgcaaaatttcccctcttggtcaattctttgacagataactaaggaaatttgtaccttgcaccttctctaattttttccgagagcatgagttgtatccaatgttagggagctatgcccctgaccaatatgtggcccaactctcataagatgaatagaggtacaaagaactgctaggtacttgttcattgaaggaagataaattgacagatcaaaagaaaatacaacaattgcaggaagtgagggggaaaaggtggtcctgaaatttgttttccatcgtaataaacttgttttatccgataaataaggttcctttgcagggatatttgtgagaaaggtttgaagaatttttcttataatatcatgggcttgaaaagcatcaatgtgtgttccaggcatctacatgtttaaagttctcggggtaatgcctcccaggttacaatttggagacaaatataaattttccacattggacgcagagtatgctagggatgactgtgtttaaataccattaaataaataaatgttgtctgaacatttgaagtcttgatgtacatatcgttaaggaatctttattgaggggaacgttcccaagcagaaaggatctatctacgaaaagggatcaacggaaacagcaatcagtctgtaataacgtttttcaagattcttatggtagataggtccttttttttcttaggaacgtccaagtaacaatgctgtggcatgaaaattgcttggtgtaaaaagtgaagctcgtgtaaataaatgcatcggatagtattttcatcccaagaacagagtacccttcactgttctcccccgagtacaagaaatgaaaatctgaacaaagtacctaagtgtctttaatgttatagcataactgctgcccaaaattcatctctctgtgctttaattatttttcacatttcaggaatccttcaaactaatggatgcacacatcatcgccttccagtcgaagtattacaagcgccatttgtgacattaaattgagatatttcatatgagtttaaatgaagaatagtgccgagcacaagttttcagcagtatctggcatcagtgaaggctttatgttgccaaacttctcaaattgttcaatttttttacgaaaaagctaactagctttcaaagttttcccttaaattaatttttttcattttcccttaatgtcattaagattaatccttgacattttcatgaaagtctgtgcaaaatttttaaagaaaaaatcaaaataatattgagatgtccagcagtatagtggcgaatggtgcttttgatacttcatgcgaaaagtgatgacattgtatacctccactccaattctgcccattttagctttaatcgatccttttatatggacacttgtatgcaacaaatgggcgggtaatttctcatcaattctcatgaatcgttggtgaaaatgaaaaaccttaaatctggataatagtacctcgaactttttttatcttgcttcgatttctcttgaaaaactcacctttggattttcttatacaagcaaagcaacatgatgtcaaattttctgaatcaaaggcagttggttttcttttgtaaaactaaaatatgactgaagtcagtaatgacttcttttccactgctggttgatgctgtctatctatcgatcgctaaagtgcaacatgtatttcaaaatttttgttcctatattatttttttaaagaaaaatgagccaacttggtagcttgaaatttttacagaatattttacttgcagaggagaaaaatcaagctttcaagaaattacgttgactagtttttcaaaggaaaaacaatgtatgccagaaagtttccaacattgcaaacgatgatacatggttctgccttttggctattagtatgtaaaatcacactcttgagcagttagtacttaggcatcgattcacaaaaagaggataataacaaacatgcacttataattaagaaaatcagaaagttgtatttttactggctctgtaaattggagtgcaaagctaataatggcaaaattagaatgctgttgtactaatgatgcatccaacgattcccttatgtcactacgagaaattttgttcaaaaacattgagttgctctgattcatcgattttaggacttcattcttcttcttctttagcccagaattttgatgtcaatgcaaagaaaataacttaaccttagtaaaagagttgtctccaaaacaaaattttacaagaacttgaagagttgcaaatatattaagtttcatatacagtagaacctcaatttcacagccgaaacattggtttttctgcacataactataatgtaaagctgcaatttctatccaatgacttggctgtacgcaaggtttgagtaaaggaatatcactacttttatataaacgttgaagtaatgccactagcgactaataaactgagctctattccactgaattaaagtaaaacgcaggaacataatacggagctggaatcatgaatctattgtatggtgtctttccatgaagtacaactgtctgctttattaggtcaggcgattgaggttttactgtatcttcaagtacaatctgtagctcgttttgaaatttcttggctgaagaagtaaatgctctgtccactaccttgaaattcgatcagcatgataactgtggaatggttttctggatgtctttcttctttcttgtgttttcgctctcgcaaagtttgccaagaggaattattcaatgaactgtgcaagtcctgcgtagctagatcaataaaaactctaaaagagataaatattgcttttcttccgtatgagtgtcaggtgcgttctaacttataatctaatcttaacttaacatcacagactaatttgattttttatccctcgttcgttagctattctctatttaagccctctattccttcagggtgtgtgcaaatattttcctgtcctggaaactcagaactttgaaatgcataactctaaatttacctgctaatcagttccataaagaggtaatttttattccttgcttgctgtaaggttgagtcagattctattgtgtcaaaattatgtacgtaataattctagtttcccaagaccaggccacaaacatatccaaacatttctgtgagttctggttactgtagtattggaaaaaagtcccttatatcttcagaaatactagttccctgcaattttgatctggaatagcagacaaaattattcatcccaagattctgagatcacattagcattcaatgtgtcgtatcagtaaagttttgacacacaagctttaatgtaaaaattgcccaaattttgttctcaacagatgcaaaaattcaagtaccagttagacttcaactagaccccgggagagccatcctattatgtgaaaattatatatttcttcaacattcatgaaaattttgatctcatgtatttgttctgaattttggtcaacaccttggaggaattctttgcttggctatttgattctctcctatcgctagcattccttaacttagacaatctcatctttagctcttttccactacatacattcataatacatgcacacatctaccagcaaacctcgaattccatgcaattcttgttggtgtaacaagtgatcaaggattgcagagtaaccgccttttcaaatcttagattcttgttttggcaacttttggaccaagttcactcaagcagttgctgggcaatcctagctttacatggtggttgctgagcaattctggattgcaatttgcaattaacatgtatttgatggtgtttgttttggtgctacttaattcttatccaaagcactagatattttcgaaagcttggattgtagatcaagtcctgaaattagtgaagacatttgattttcgtaaccttttgtttctaaaattggcttttaaatgatcatttatccatttatttatttttcattttcctgattagttttaatttgggaacactatgattaattctcttttgggttttgtagtcataaacctaaaacttagcatttttgtgctccctaaaaataaccaatagaaatagctttaagttactgcttagaaattaaattttttcccccttacttttctaaggcttttttttatatttgtgttgtctttgcccttttcaaagccaccatcccttttgtactagaagtacaatagaataaaatacaaacaggtatttaggactgtattgtagttgttcctggatcagcgagcccggtatggtttatagtgattcaggaaggcttaaagagatacttaacgtggcatcatagataggacaatctcaacaaatctcaagtaaaattcattgtcagtctagtccctcacctccaagtatgaacaaccccatttagttcttcatctgttttgcaacttttcaccaaactcttaaccagtatatttacattttagtgtcgccaaaatatgtctcaagctgtgtaacaaattctagggccagtcagaaaagttgtaatgactttcgagaacatttttaaaaaaattgagaagttcaatcttagaggacgtttatattttcaaatgtttctagtatcaatgcactggttcatctgtcagaaggactttaaaattatataggcggatattatatcagtcagacagttggtgtagaattctctggaaatggtttctccttgattgtttctttttttctttcattttttatttttcaattttatgtgtgaccctgttgtagacttatgcatgctctgatttggtagagtgtgtgctgtgttgagtagaggcattttcctttgtagatttattttggttgtatattttactcagaggctcaatttacaattcatgttttgtttttctcatctttctctaattttctgaaacatctactcagattcttgatagacaggtgcatttattctgagcatcaaccagagtaatgatcaccagatcttgctttatgagcaaaaataagggataaataatttttggcacttgttgggctttttgctgaacgaatggaaatgctttaaggtttgatattacttaattgtgctctggctctaaggtactttcctacatgttaaacttacaaacctgaaaaaaagtagggccattaaagtcatagtttaatttttagatttgacaagcatgtaatttactgccaggggaatttttatcattttatgcaacacctgtctatgttacatgtatatgtctgtaatttgtaattcagctaaaagtcaaaatttcaaaataaagtaatcaagtacaaagttagagcaactcagtgcctaccgagttttccaagactgaagcttccaagtgctgcacctgtttatcatgaatttatgttcatcagtaaccatagatgtggtctcttttatcatgaaaacattttttatgcaaaaattcagcaattcaagattgcaaattttggattctcaagtttaaattgaaatcgattttttaaataaaccaatgggccaccagacaaggtacaaaattaagaattctgatgtacattttgtctccaaaatttcaagtaaaacccgatttgcgcaatagaaattactgaaattaacgtttaacagtcttgacacagatatcaacgtgtttatttagcactgatcatggaatatttgaatttttcgctcccaagaaaaacgagcatccaagggagtcaaatcttgcaataaacggctttggcaagcttctcaccctacctatgttgttcaagtgttaacaacgtgcaacagctgggccggagccctgagattgaggtcaccataattttataccctagggactattgtggtaacgtccatggcacaacttaactttggtggattatcgtttttttatgagcaagaagttgaaattaatgcatttaaacacgttaatatcttgattacgagttacttccaaaaatttttattgtataaattgtgttccatagaaaattttaatgaggaaacatgtatcattatgctcaaatttgagcgttgtcaagtggtcgaaggtggagaaaaattgaattattcttcagtaggagttgggctgcacttattctcgtggacattttatacctttgacgtttctttattgaaaatactttttgttccaattaattaaggaaataatgaggattcttaggtatatcatgtatgcaattttatgtgcagtttaaccaaatttttacccttgaaccttagtaatgttgaatattattactagctggtctgtttgatagacattcaataatgtggtttattcacttgtttcatcacactctgttgtgatgaacagatgaatttaaccaagaaacttataagcttcgttttttaaagaaatttttggaatttaatggaagtaatatgtatgagtaggaataggtcaatgaaaattttgtgagctcctgtcatcatgtaacccatagaatgaagtacttcacattgaaaatgtttaaaataaaatcttttaaaaaaaagcaaatgattaaaaatgaaagattcctttactgaatgaggagtcaagaagaaatttcaactcgtgattcacacacttagtgacaagcatttctcttatttttatcaatttatattggaatatctagttcagaattttaatttcttcaagtcatgcaatagatttctcttaacaagaattttggaattaatgaactgtcggaaaattctattggcatctcaaatttcaaatcaaatgtttctccttctctcacaggtgttctcacttgatactccagaaacattccagtgcttttacaatcctgcatattccagcaaccgcaatgccaatatggaacgtattgcagagcaaatcgcaacattatgtgcaactttgggcgagtatccctcagtaagatatcgcaggtttgtatttatgatttatactacataattttataagcgcagcttatctgtgatcagcgggtttgaatattatagagaaagccattagccaaaaaaaaaaaacaaacaaacaaacaaacaaacaaaaaccttacgctcggttttctgatcagtttcagctgagataaaactagtttgtaaaactgacgataggggctaagctatattagataaattttagggcaagtttgccctcttagttaagaaaaaaaaatacatttgtcatcttacaaacaattgtaggtaactgcacttgtctgttacttttttcaggcaaaccagtctctagtctctgttcactttatagtaaagaaatttgcagaagatttttgttggcttggaatctcttgaattaggctttgataaccatcactgtcaagtacaaaaaagttcatcactcatcataatatctctccaacaaagtgaattattatatgaattttttgttctgagttttttgattatccataattctcaagaattaatttttcattcaagtctaatcctccagattttaatagtttatactcagatatccaatgagataggataaaagccttgcatcgctcctcagttttccataagctcttctgttctattgttcagtgactttgacaagaatttggaattggcgcatgtgatccagcagaaattagatgcatacaaagctgacgaaccaacgatgggggaggggccagagaaagctcgctctcagctcttgattctagacagaggctttgattgcgtttcaccggttctccatgagcttactcttcaagctatggcctacgatttgttgccaattgaaaatgacgtttacaagtaagtaactattctctcttcttcatcgcaaacctcactttattacagaaaagttcaagaggtagaaacataatgtacagtagagttgccatgaattggctgttttgtaaaaggttgttggtaggctgtttaaagactgttttgtacttttgagactagtgtgcaacaactggtattggtgcatatgcaagttcttagctcctgagttcccaagggcttcctgctgtatgtttaagtaggagacctgtacagtttctaatttattatggcataagtaagcattattttcctacatgagttggactattttaagaagtgagtttctcaaaaacagacctctgaatctccctgaaacttttttgacaccaagtcgcatcaagtttgaactgagaaaaggaggtttcaagttttattcctccaaaagactcaattttaaggacaaagttgaacgtattttcatgttcaaaatattttctcttgccactgaatttttgagtgggtaaaatttacaactatttaaattcaaaactgtgaccagctgttatttttcttttttcaaaatgtggcttggggtacgttgctgttaaatgtagtccaaacattgttgtaccgaagctaaagctctagcgtctagccccatccatgtcacaattttaattctcttttcttttgcaggtatgaagctaccgctggggctccagagaaagaagttcttctggatgaaaatgatgagttgtgggttgaattgagacaccaacatattgctgttgtctctcagtacgtatagtatcttttcttgttttaatgtatgaacgcttgatttgatgattcaccatactgtatgataatatttgacgcgtctagcaaacaggattattagaagtttttctttacattatcaggattgatggaagggggaaaattgttgtcaaggcaactttttcccgaaagtcaaattttcactcttatttttttatttatagtaaggtagtatgtgagtcttacaatgaaagttgtacgcaaaagcttttgctaatataacatatttgtatcgtaaaattaaaagctagagcatttaaacaaaaatttaagaattgttaagcagttttttaatattcagaatgtcagcggaacatcttttttttcttttaaatttaaatcaagtagatttcagcatttctgggttttaatgtttggacacaaaatatgcctcatcaatgggttcaattaagtaattcaaaatgtatctgttgcatctcacctaaaattttgatgatgaaacatggattgccttgccttgctttttacctctttggtggtttattttgctaacttttcaaatttttgaaactgattaattgttacctcccagaaaggtacatgatgaaactttcttgatagcatgactcaagatttattcaattttttttgaaggaatgttaccaaaaatctcaagaagtttatcgactcaaaacgaatgccccaaggagacaagcaatcaatgcgtgacctctcacaaatgatcaagaaaatgcctcagtatcagaaagagctgagtaaatattcaactcacttgcatcttgctgaggattgtatgaaggcataccaaggatatgtcgataaattgtgcaaagtagaacaggtacctcttcttgattttttgttccttgcattttatgttaaatcattctcagactattttttgtatctgttttctcttgtttgtattttttttttttaaatgtgtatgtatcctaaaaatctttgacttttaacgaatgtgtagggtgggagaaaaatgcacgggtttgacaagatgataaaaattgtttaaaaatgttatcactcataagtgttaaatagttctggttttcaaagtgtttcggtccttcactccctggccatcatcaggattggctgactgatgatggtggggaacggctgaaaagcatctaaaacgagaactttttaatgcaagtaaatttccatcatctttgatttttgcacataaattgacttttcagtttaaggaaatatttagaaaatctttagagatatcaattggatgttgatactttatgtggttttttttttttttttttttttttttttttttttttttttttttttaccaaaactccaatgaaaaacttttgatgtgctgagacatattttgtttgtcgacatttgttttactgcgtatttggttgatattatgaagaaggagcaaatcacgcatcgaacattagtttcacggtatgattatcatttttgtagtgagttttgtgggcctttagccccatctttcttgtgagtccgacgtttaatgatacaggacgaatgtttgctttttcaagcagacattgtgtagaaaccaggacaatgattggcaattgattttcccagagtagcggctaaagaaaagacatcaaggataatactgtgaccagtacacttcaatagagatgttgagaatttggatgaacaaaatctgctccaaaactgggattgaaaaaattaggattttaaaatatttccaaaatctgtgaaacctccaatacagagcaccttaatagcttaaaatttgactttttcaggatctagccatgggcacagatgctgaaggtgagcgcatcaaggatcatatgagaaacattgtgcctgttcttctcgacaaagctgtgtcaaattatgataagttgaggattattattctgtacatcttatcgaagaatggaatatcagaagagaatttgaataaacttattcagcacacgcaaatttcaccgcaagaaaaacaggccattgtaaatctagccaatctgggagtcaacgttgtaacagatgtaagagcttttactatgattttgtttgtttgtttgtttgtttgtttgttcaaaagacaattaatatttcccattcatatgataggcttagatggttaaaaatggctgctcaaattttcagaatctttaactttacctgtttgcatgtacagcttttcattcatgagcctgctttaactttcaatatctaaaactacttcactagctgtcttagaagaaacatatgtaatatggctttggaacatggtttggcaacttcggactattgcaaaaaaaagttcaagagaaaacactggattgtatttcctggagaaaattaaatataaatggaatttttgaaaaactgtcagggagacatgagtgagttttataattggcgaatgtaattacgtaatatgctaaagtgtttttgaatcccatcatagaagtgaaaaattaaaatagtgaatattttcaatcacatatgtctgaattaatgacggttcaagatagataaagctgatcatgttttatgtcaaaaagtgaaattaatataggttcaaaagcaatgagattaataatagaatttgagatgtatgcataactcccttattacctttccagggtgggcgcaaagtaaaagtctaccaaccacctcgcaaagaacggattactgagcagacctaccagatgtctcgttggacaccagtcgtcaaggacttgatggaagattgcattgaggataagttagacctgaaacattttccattccttggtggccgcgcagcctcctctggctaccatgcacctaccaggtaatatttcaactgtacattatttgaagggtatcaagaatgaatgagataaataatttttgtaatctcaagaaaaacataacgggctcatctccgaatgattttgcctctaatgaagctagtgcagtcaggggccgttcgttaaatgcgtaacactctagggagaatggatgagagaattacgccaatttgtttttatttattaaaaaatagggacctttgtcacaaaagcgttatagacagggagggggaggggtttgaaaaattcgaaatttagcgttatgtatttccctcaactcaaagaatttttaactctaaaaaagttttttgactaaatccggcagaaaagaaccttatcgcattaagttaaaacagagtcaaagaagtgtgaaggtttcttagaatgaatttcatgtctcattcctgggacactaattattcgttatcgccctcgatttttttattttttaagatatgtacccattaattaagttctaaaatactcaagacacaattttgttgaattatgaccggcctctttttgtcaacgtagtctatacgtagtctctttaggaactctttttcaaaaatatgatttatctctggtaatattaaccaccatgatggctgaagaattttgttgattttgaatgctcttattacagtgccagatatggacattggcacaaggacaaaggacaacagacggtgaaaaacgttccacgcctaatagttttcattgttggaggtgtctcatattctgagatccgatgtgcatatgaagtcaccaatgccatcaagacatgggaagtcatcataggtaaggctgtgaaggtttcactttcttgctcgttttatctttttgtaaagcccaactagtgtgattcagcattattatgtatcggcagactttggatgttgggcagtagggatctttctgcatgcaacatgttttgttcccactagaaattagatatttgccgagtgattagcaaattttgacattggccagcagcatggagaaaaacattcagggacgcgcttgccacttactaaacccagaatgtttgtctttcaacttttaatttggcaaaaactatgcagtatagtgccacttgtagtggcttccaaattattaatggttgtttcaattttagtataaaaattggactaatttaactgggttaatataccaagatttttttggtgggcgtttatgacactgttaaatccaatacagtgtgaaccaatcgtcaaaatctcttttttcccccactttgatggaaaatttctttaatattttccataaactttgtttaagttgtattccaattcattaatgacttgatattaataactttcattttgacttgattttgacaggatcctctcacatactaacgcccgaagatttcctaaacaaccttgcaaatctcagtgcataagtaaattctttggagaccgagtaagtatcgcttctctgtgataaagttctaatgtcgcaatagtccggaaccgccgttcaagtgtattcaagttactttgatgatttgatgcaaatccattgttttcacaatattcagtgttgttattgttaatctattcattttattatttattgtatacttcatttatatttatttatttattcaaattttatcataattgcacggacctagatcctaagtatcggcaatgtggatagggagtcaaaggaaacaagcgcttggaaactaccaaaacttctcgtaagtaaattattccagttgtgtctataacgttaaatttgcattcaaatgctaaaaaaaatatttcatggatttcaaaaaaaaaaaaccgaagtgcagaaaattgattgagtcaggtgagaaatgattgatctgttagtctcccattgtttgtttcccaggcttttattcacctacctccacagctgctgatcattagtttaggttttaggtactttaatattattctaataccattaagttggttttgttcaaaacctagcttttgtaactatccgtaacgattaagttaattaccgagtaccttaggtagtagcttttgttatttgccgtaatctcattcattttcatgttaatatcagcgtacaccctgtcatcagttaacatttgtctactattttcttctttttcaacatagtaaccagttctgaggaaaaatagccgaaattagaattaaattggttcgcaaagcagagaaatgcatactgtttcagtcaaattacatctcatattctagttatgtgcgatcctactagataagttaattttcagcttaacgttttgataaatttttagttttccacaatatagtgaagcctttttcttcttgaacgataacttttcgttggttttatctgatatattttcagttaaatccattagatttaaatattccttcaagctatggacgttaagatgtgtaaaagagacaaaatagtttatctaggaaggcctgagaatttttagaaaatcgtagtgcctctgttaatgctgatcattacttttttctcagttgctggtgtcatattttaggtgtataagtttatcagccctcataattcaccctgttcccaagaagttgtttcaattcttcttgggcttataaccaatgacatgcttcatttcatgatatgcacttgacactgagtttaagcaaatgcaaatgcaaaagttacacacatgtaatgcacttaatgattgattcacacttaaggaaacgctataaacaattactttataaagttgattgtataatcttacaaagttgattttctagtatactacaagtgaaatcatttgagttacccaaccatttgcatcttctaatttcatcaaactaatgaagcactggtttattgactagtatcagatgtttttcttgaaaatgttgtactctatatagagaagtagagttttaaaccatgagattttaatggtcacctttgtgatattctatgtatttgatgatttgcaaggtttaattctcatttgtggacatttttctacaaaaatctcttgtcttcagcacttattaacaaagaatgtaatcgtctgtcggaaagataaagccttaaaagctagagaataagaaaatatttaaatttttagagtgcacaggagctaacttctaatgcatatttagatctcaatagaaattgaatctcgagagcttgatgattttctgcaaatttgcaaaagctgcgatttgctagaagcacttcataatttaagcgaacatccttcaaaggaactatcagctatcagcagttacctgaaaatcattatgtgacatattgtctctatggcagtaagctgcaagaaaattgaaattgcctgaattaagaagtagtgtttaatttttctaatattgcttcaaacaacattccaatttttcaaaaaattatttttgggcacggttgtttttaatagcaatcaacaccgatatgatttctttcaatattctgtgttcagtttctgcgttaaatttaaagtattttgtttatcagttgaaaactcttagtgaaatcgcatttcttagtacattatacccaggcaaaatatgcatttaaaaggatgtttatttagcgtagttagtatgatgcagaatttttcagaaatataaagctattaccaaagaaaccaaagacaaagcatacttaattttatttttcattaaagtttggaggaaataattgtacactatctccaagtattcatcaaaattgtaaagcggttaatgagaatctgacaacaatcgaaatacaagttgaaaaatgtctcttattttatctgtatagtcttgaattatattaagcgtcatcttaattttgaaatattacaatttttataatcatttagacaaatgctgcgttagaaatgctattttccttttttggaaagcatatctgtatgaaataatttcaatgtatcagtttatcaagcataattttattttggggatgcttcacaatgaagattaccttcgcaaaaagtaaaaaaagaagatgccttctttgtgttatttagttaccataattttcttttgtgtttttatctctagcaaggtcattatatgtattatttttaatttgtaatatttttcaaacaggtcgaaacagcagttcactgtaataaaagcattacctcacttgttgcagtcgtaatgtgagagatggggttgtgccgtcattttggagtaagggtaaaatcttacatgcaaaatctaacatgatatcgtggtggcaagcgtacaacaggccgattactaaaattatgtgttggtctgctggacaagaccagactaagatggaacaggactgtgtgatcagctggttacgtcaatcagactactagcaaccattttttgtgctctatattaggctgaatgatgaactagtaaaagacgcctccttgctggctgacaaccagtcagttatttagcccaattaagggcttacaatacagctgccggctgttcactcaacttaggtgattaattaatagctccattccatcttcgttcagtctagtctagaaagcaaactcataatttcaatgatgagcttgtagggaagtttttctcaacgtgaaagcggtctaaagttaaagttaaaatgctctctatctgattcaagcagctctccttagggtgggccagattngggggggggggggggggagactaaatgtctttcccgggaacttaggcacaagaaagcagatccatgtctgattaaaaaaaaatcggcccctccagttagtttttgataaaaatctgcgaatattatcctgacatcacaaaatctgtacataattttctctctcaaacaggattgaatttttggtggctttgacagctgttttctcagcaaatgctcattgttttgtttaaagaacaaaaacagtgaaaaagaaaaaaaacacacgtgacctcttttaagtaccttgggagaataggtaaatagttgaagcagccccatcagtgcaaggcttagtactgttatgtagtttaattgtacttatcatttttgccttgctcagacaaggatattttatttattgatgcattatgatgctcgttttagcagaaagcagtcagtattactaggttccttgtattagtattcactagagttaattttgtagaatcggatgcttgaggaaatttgttctaaagataaattcgcctttaactgctctttccttattttatttttttttactttaggtcaaaatgaagtttttctattacgtacattttagtttatcaaaaagctcccaagttagctgaatcgggatatccatagctaaatttttcttgtcttataatggggatagatgagtgtaacctacatcattcatttatattcaattgtcttattcatggaacgattgtcgaataatttttttaatgaggacattagtcattagtaaggaaaattccaattttttttcttggcccttttattgtttagtatctttcctctttcattctagtcttcaaatttttgatctgtttcagctcattaatgaaacttgtactaaagtggcctacttttagctgttgagtagtctcttttccatgttttcatctaaccgaaaattttttataaatacaattttagtacctaacattaacgcatggttataatatccagtaggtttttaaagtgttcgcaatttcattttcagatagttgtttatcttaaataactttttggtggatagctctggaaactatagaaaatttaccctcaaagactaccattgattgcttttaatcaccgatgtataatattatttaatgcaaattgaagcaaaacaaaatttaaacagaaagagcactcagaatttttaagtgcaaaagcggtccacagcaccaatccccccaccgtatttaaattgaactttgcttcaaccaaattcgtttgtagtattgattccatgaattttttgactagctagagacgtcatcagaataatgcaaaggaaatccctgtctgttagtactactataatagagttctaatgactctaatagagttctaagcaagagcctcgttagtcaattgtatattgttttatcacttgtttgagcctgttaattataagttaagtaatcctgttcaatttttgtttctgttgtggttccagtgtacagtcattacaattgtaaacattacatcaataatatttatttctcttcaaatt

SEQ ID NO: 15 - DNA, 11404 bp, Bemisia tabaci
  source 1..11404: mol_type = genomic DNA
ccattgtgtgccgctgataacttgtcagaagccgacgtgtaattactgtaattctgcaaaaatcccatctcaagcggcttcttgtccaggtagatcctcacgaattgtaatttcggctcctcactaaagcactgtgaagttatagttcatcctccgtcttataaggtatagttgtgctccagcattaaatcacttttcttctcaccttccagattcacttttggctcgttttcagcctaactcattctttacctgagccgcttgagcttgcttttgtcgtctgttttttagatttagcgttgatttcctcacagaatttttaatagagagtcatcatcaatctgctgtatatgcaactgatcttgtttgggttagtgttggttttcccgctcactttatcagttatctctgatgaagatttagagcctgctcatcgtttgtgaagacaaaagtcagcctctagatagctccaaacgagcacattccaacagcttcatacttgggatttgttgttggtgcaaactgttctgaaacaactcatcggatgcccaatgattgtcatcgattaactctgtttgaactgcccgataactcgcatttctgtccacgaatgccgtatattttacctaacactgaactacctctagaggtcagcaggatcatttagttacttttgccaaacagatgaacaaaacaataccctactgtagtctggactcactttagaagtggaaggcgaaactgagtcattgatgcgttcttgagtattgaacacggaatgtgcgctgccggtacaattttcaatatcattgatgaggtcaagttgtatgagccatcaatttttagaacctaagtggaattctgcacagtatttcaggtaaaaaatcagcaagcaaaggaaactttgacggttgaggcgtcgagtgcagaaagggcatttctcggtagcggtgtctcagaatctccagtgctatttatattttagagaggagattatcaggtaaattttctgaaattttgcgttttcagcatcataagatcataaagaatatttggtaaaagtagtgtcaaattacatgcatttgctttaattacaatggatgaaacgttggcagagattttgagacaccgcaaccaagaaatgtcttttctgcacctagtgcttcaattgcacattgctcaagtattgccactaatataatttaattcttaagtacctccattcgtgcatttacattggggctgaaacttctctatcttgcttcgtcttttcatggagatgaagttagaaagattccatcatctcattttttcaacataattataaaactactgacataagtattttgaatcctcagtgtgttggccgtttctcatcacacctattgaccagagatgtattctattctcatttcaggatcctgaacatcaaacatgtctccaaccaagcagtcacaattgaacatacattttcgcgtcacaaggagtggcactccaaaaggcaaacgcaacaaagagaatgacaatactccttgtaagaaaccagccccagtcgctaccccctacaagttaacctccgaagcagaaaattacgtccacattgacacccctcggccaccgaaaaggccctactcttcatcaaagcagactgctgaagacatttcaccacccaaaggtattcacttcaaacctgaatgagcaagtttacatcgccaatgattgatatatcttaaagagctgttgttaattcattcaattcatgtatctgagagcattaaacatcgggaactttgaaaaatgttgcgctgtatttagattaatatacagagtacttaaatccctgacacgcacaagaacccatccttcaggccctttgcaaatcagcaattcatttaacatagaggaaaaatttcttgtgctgcctacaaatttaatgtcggatgaattttataccaatccttactagtaattgtcccttctgtgagcgttgctttttcattacttggagtgttgtaggtaattatttttccctaaatcgctgtaaaaacaatatgataaattttcatgagctagaaagatgttggctgatactaattaatacagcaccgtatttgaatcgatactgaaatgtattgacagcttaataattaagctttcaatatctatcaactacaacaatcataacatcaattattggtgcgagtataacatgtttcaattcttacgtccaagtagctgaatacaattgtttttgtaagtaagtatttcatagtaaagttcttagtctagactttcttcttgtttaatcatcagaaaatggatttaaattggcccgcaaagtccttcatggaagtgccacatcatccttacctgggcgagacaaggaactaaatgaaatgagatcatttttggaatcccatttagaaaatgagacctccggagcaatgtatgtttctggccaacctgggacaggaaaaactgcatgcctcacacatctgttgacagaagaaaaggtaagctagaatttcttgaaaagctcaagcgacgaagtgaaggatgtaataaactagcaacaatgtgtaaagcctgtctttttctatgtttttcctgcagtcttctttcgtcaacgctcagaaaaatattttctagtcagtaccagagttctagaattttattataatgagcaatttattgacatatttaacgcatataaacgttgctcttttcaaaattatcattgaagggaacttcaatgataattttgaaaagagcaacgtttaagtaccaaaatgccaacaaagttgaaaaaccgttggacgtgcatagtattaacacaaataacaggaataaaaactaatttctaatgccgaaagataacagctctatgtagtgcaatgtctgaaatggtttaatgcccttccatccatcacagatatgacagataacaagatattttctagaggaataaaaaattactcaattgacaagacattttattcaatcaatgaaccgacttagtgaaattagttgttttataatgtagaaataagactctcatttgtttgttcgttcaaagttaaaaaacatattgttgacgcatttgttcgcctgtatgaacatttttgacgcataaattttattattatcaagggccaatcttctgcaatcataattattttgcacaatttaagatatttctggtctaaataatctgtaggtatttaattaaaaaaaaaattgcttattataagaagcagagcactattgataatcttgtgttcttttctctcttttcagataaagtcaaatttcaaaattgtgtcggtgaattgttcctacatgcagtctgcagttgcgatttatggtaggatatgtgaagaactttctctgaaagtttccggcagatctgaaaaagaatatttgacgaagattcggaagtacctgatcagtgaacataaaatgatgtgagtgaataactttgctatttcattttaaacattaaaccatttatctttacagtcaatggttgtatttacagagtgatccaaaagtcccgcaccccctccatagcctccagggttcttgccacctctcaaggtgatccccttaaaattttagagggtctcagcacgttgtttcctttgacctaggatcattcacgaaatttcaagtctctatctcaatttgttcgaaagttacaaaggtgatgtcagttgctggtggcgaagaatctatagatcactctttttacgttggataaaattacgatgtcaaccgttataaccatgcccaagtgatattgtctttatttctatgtgtatcttaaacacgaatacaactgtcaaagtagatttgcagcgctgtgtcttctgaaacctcaaaataaattcaaaaatattgtttccaattctcaaccgatttgaatatattgagatcggtgtcaagttggaaatagttctttcaacttcatttcaagagttagaaaggtgattttcgataacaaatttttattgattgacgcaaagactgaactttcaatttttccaaagtactttcctgtgtagttgaaatttaaaataaatcaatcgaacctaatatatgttgtactgaagctgatgattcactctcatcctcaagttcataaattttccttttctttcagtctattgatacttgacgaaatcgatcaattggagaccaagaagcagaacgttttgtactcaatttttgaatggccctcattaccggatgccaagctggtcttagttggtatagccaatgccttagatttaactgaccgagttttgccacgactgcaagccaagcttgaaaagcaaccgcagctgcttcactttgcaccgtacacaaaacaacagattattgatatcatttgcgaaagatttaaagaggtaagaaactgcaatttcttcctaaaaagacttttaaacggaatgaaaaacttgagcgcaaaaaggcaggaacactgatgctactgattctttcttcagcctaattttgcgatcaaactttatcactgcaccaagttttttggactatgagtgattttgtaaaaatctcttttttaattttcaaaaatttcaatcagcttagttatttatcgagaactaaggtgcataaaggaaactctttttttatgatgtttaagaatcgccaccgacaatttttttttgtgtgcaaaaactaccagctcattaaactaggttcatgccaaagacaacgcttaaattatacagaatagcttgtgaaagtcccatctctctactagcatttttttcccccgttacgataaggaacataaaagaagattctcaaacacggaattatagaaacacccttttcacactcaattcctcaattatctttgctacctttgaatgtactctttttctgtggtgcatcatttcccccgtcaaaagctctttaattttcatcaaacgatcaagccctcaggaaagtttgtcttcggaaaattctttgaaaaaaaaaagtgagcctaacctccaggcggtctaaataatgccaaactcaattcaaaaaaccataagtaacttcggccaaactcctttttcttttgtcaaaggagcctgtatgcattctcaacctttggttttttacttaacaatttaatcgattgttgtgttttcagggtaatatctcatatttatttgatgacaatgctttaaatttactcgcggccaaagtagcagcagtctcaggtgatgtgcgtaaagcattggatgttgctagatgcgcagtagatttagctgagaacaaatccaaaagctctgttttacaaccaagctctaacaatggtaagataaattttcaggcccttccatttttctactcgatatgagttttttatttctatttttcaaaactcataagtagcaaaaaattgacaaaggaggttttaatgaatgtttattatccgtgctcctttgttttggtaatgactttactgtattttttttaaatcaaggagattttgttaaaaaaaatgttcacgatacaagttgaatgcaaagccaccaaaattgttctcatatgatctactgctccttctctttttgagattttttttgccaggactgaaatgcttttgtatgtgttgatgactctgattatttacgtgctcaatgtgactacaagtcatttctttggtatgatgtctagcgtcagcaaaaaacaaaaaagctggaaaatatcagtaaagttgatgccatcaggaaaaattaggagaatcggtcatgcgtcaggaacatctgagtgtgtcaagcatctctcaagcacataaaatttagtgcatgcaaaaagagaatcttttattcaattaattaattatgttggttagtaaaatcaaacagggtggccatttattcatgcgaaaaatcagcaactttcgttaaaaatatcagaaaaaatcagaaacatccaaaatgaaattccagtagacactctgaaacattgtttagtccatacaagagtgttagttatttttcgattgagtcatattaatgttgccaatcttctcacagtttcaagcagcagcgttgcttcccttgacaaaattgaattaaaagaagtcctgacgaccatcaattccgtttacggaacgagtcaagttttgaacgctgtgactggttcgcaaccatctctacctcttcagcaacagttgatagtttgttctctccttctcatgatggaccatgaaaccaagaaactggacatcacattaggaaaggtaattcgatctttagcctagtcagcatctattcagcaaaaaaattaacagaatttgaatattaacctttttcttaaagctttctaattattatgaagtaattttgaggtcaaaatttatagatgctggagcaacatttaatgcaggaaaaaatgtgagaaggctcatagaacgtgcttcaccgtgttgaaccataggaatcttaccaaactgtacaataggtttgtgatctagtattcagcggtaaaatcgtagaaatcgtcatcaaagatggcttccttgagttgtgggtaggtgtggaaattgggaaaaatggaaaggctggcaatgatgttcagctaaaaatacagttggagacgtagatatttttcacatacttatctccatgtttgtagagtatttaggttcatctactctggaattttaatttgttaaaaaccttgctattgcggctaatattgctgtcatgtgttgttataatctttcttctttctctctgcatttagctgcagttacgttaactcatactttgttaaatgattactttatatctgtttttgtttgtcaattgccaaagtttgtacttatttcatctttttttgtaagtaatgggccagctcatacactgttgaaaataaaatgaaggcccacagcccacacattttaagatgaattagttgtctctgtaagaaatctcggaatagcagtacatctttagcttttgcagaaaaattcttttttgatcattttgcaaatccatcttttaaaagtttcacttcctcttatttttactccttaaatcttctctgttttgatggaggaaaaaagtttggtttttaataattaaatagttaagtggtcctcctctgacatgaaaggacaaatgaagctttggaacacctttattgtttaaatttgcaaatgtaaaagcacgaaaaatttgtactgttcctgctaaaatgaaaaacaaaatggtcccaatagcatctaattagttagtctcaattaggacgagccaaggttcattctgtctttgaaatcagcgcaaaaaaaagtaactgacacaattataggtagcgttgatatttctcaaggaagaaccgaactaaccaaatatttttttttttcttagttgtatgatgtgttccgcaaagtctgctcaaagcaaaggcttggtggtgtcgatttatccgagttcatctccctttgcgatcttgttcaagcccgaggaatccttaaaattcacagcaaaactcgtaatcgacagtcaaaggtaattttttgcttctatatcattttcgtgttgaaaaccctaaaatctttcagtaatatgtctcagcaccatagaactattagcttttttcaacaatttattaaaacattcgctgtcaagaaaagctggaaagttaaaaacctttcaattaagttcctctgaacttaaatcagggagtctttgagacaatcttgcctttaaaaagagagtactgtattgcattatcttaccttggaatatatgttgaatatttttagtctattttctgaagattattattacggtgtttcaatttcatcgagcactgcgaggagagagtggtgaagaattacaattcagcaccttaatcagaggtgctgaagcacattgtgacattgtatacatcggtgtatgggatgaattcctgttgcgtccttgctgcctgcaaggtttatgctctagtgtatgtatttatttcagaaacctttgaagcttctaaaattttggagtgaagtttgactattgatttagtacctatttatgatgttttcatatttgttacttgtcatgccattcttacatcattgtaaatttggatatttctttgtaacataggctattttttcttgtaggtaagcttgcagtgggacaaggaagaactgatggcaattttacaagataagacgctgctatcagatatcctagcagataagaaagtcctgtatgataagtaaagagaccttcaatgaatcaaaattttaggttaattactctgacattcctattatttaattatttcgtcctcatttgaggagttgaatagtattgaaaatggttttatacttttttatcgaggaagtatccttagaaatgttcgcatgatctcgactaattatttttcgtgcatttttaatctacttttaaaagttgcatgcctgagtgaatgctcaacaatttttgtttaaaaatgctcaaattgtttagataatattttatttaataaaacaggtgacagtcaagaaatgaatagaccctggaggtcataaaattcacaaatagtcattatcaaatgttcactcattttaaaataagaccaaaaagtagagacaattttttcttcctgagtcaaaagacaagaaaaacttgaaatctatttaacttgtcagtaggtattaagttgtaactattttatacagttacattgactttcattaattagtgtaaataattagggaatatgacccatctgcgccctgtaacctcattagtatttggcacttttagatagtttgtttgacttattaagatacttatcctttgaattttaaattcatctgtactccgaaattttgatgcatttacctctctagaatgtttcggctttaatatgattcttcagaaaacgtaggttaacatcaagatatcatgcacactcgaataaaataccgatttaatgttcaagttcaagctactattgaatctgttacttcctgaggtatctatcagctattttctctgtaaaagtggccttttaaaatccttgattgaaatgacaaataaccaaacaaaaacgttcagtttgatttaatcaaattaagagtttttttagttcatgtttggatagttgtagcccatgtaatctaatgttcctcaaaaaatattttggcgaaagaaaatcgaaatttgctgctgaacaaaataaagtaatggaaaatgtatacacaaacattttattgcttcatctgagagtgcctaatgagctgagttcgcagtatttttcataatttttttctgcaattggaaattggagaaaaatagttttaaaagtgagaaaatttgccgccttgtgacatcatctggcggcattttccatttaaacacatgtattttagcagataaggttattttgtcatatcttctccattaattgttcaaatttgaaaccaaggatatcctcgtactcagttttcctagcagtatcattttaaagatgaaattcacaaaatttaagacacctgcaaattctctgttcagctgaaatcgaaattcccttatcaatctattgctatcttaatgttttttttacatcctctggtgtttacaccgcaaccaatccatcaaggacgcttcatttcagcacccctagaacctaatattaaatattttgaagcactagaatatctgtagccttttaatcatgatttgtcttcgaatttgaaaatgacagttaaatgaaatgatacgagtgtatgatttgaattttgacaattggtctgttacacaccaaatgtttatttcatcttttttcattgcctgtctgatattctgagggctagataaacagggcctattccatagtaaacagtactgagggaaaatattactctgaattttttaatgaagcttagtgtgtagattttaaaaataatttttattgctgttttttacacctaattcttactccagtgtttgttcacacattggatccaatatttctctcgaacgtgcctgggtctaattaggggaccaagaaaacagctgcagcgataatacttatccttctgttctgtgttccatttttctcttatgtcatttaatcattcaagttagtgttgattacaacctaaactcgaatttactgaagaaccatgtcgtattttaagaggattttctatcactggaaatgaatccttatttattccttttcataatagtgaagctaaatgtttgtaaatagttgtttgtgtttgtttgattttacctgagcagccttagctctacatttatttattgcttagacaattgaactgcattgactactcgtaatttcctccgatgttacattttggtcagaataagtcttcttgcttcggacaggaaagaatcttggtcttttctttttttgtgagccatcaattggccgatttattttttcctcttcaggggtgcagaaacctcccaatcatgatcacaaggccgctttcgcgaaaaaatgggaaggctgtgaaaattgggaacgccagctcacaagagcgttaaaattgcggcaatttgtaaattgaggacggaagagggtcagaatatagacaattttgggaaaaggggttctttcgatagaaaggccagtccaagaaatgggaggtgcaaaaactttctgcacccctgatgcttttttgggatccaaagctcttgaattttgagagacataggtggttgcaggagcctaaaaatccggagattggttttgaaatcaatgttaaatgaaaatgaaattgcaggaaatatgcacacaatgcagttcagcgatttgaatttatcttaccgttatttatcatatctttagttttacgtagaagtaataagatgtcttgtgtggattaaggtgagagattcatgtccttaatctctttcctttccagtattttattagctaacagattgattctgaatgtcttgtatcatgtaacttatgagatcaaagtctcgcaagaggcacagtttaataaagtcagcaagcatgactcaaaaatctccatataaattatacagcatgtagcatgtctgtgtgttttttacataacttttcagagaaaactttaaaagtgttagccatagaaacctaattctctcccatccaatggcacctcttaaaagatcacatttaatgttgcttcattctttatgcatcctattgctgaattcatttcgaacacctatttgttcaagactcaaaagactgataatagtaatcgtataaaaatttaggcaattactcgaaatcaaattgtcaaacactttacctactggttgatttcattatatttcgaatggatgtaaatgaattagatttttatttttttattccttgattattttttaaaaaaaat

SEQ ID NO: 16 - DNA, 8278 bp, Bemisia tabaci
  source 1..8278: mol_type = genomic DNA
caacctactaacaacaacattcattgataatggctgaaccttcaaagtagaataatgtttgtgtggtttgtgccggttggcttcgttcgttaaattattcttcttgccgccctaataataattctggagcataaaaatggcctatagtgttaatatttctgtggaggccccaattgaaagccaaattcaagaaatcacctacgatggacaagaaatataccaggcgtaagtactgacatggcatcattaaattaattggaactattgtcatttcttactattcgtatgactcgaatctactggatgagaaatgactgcccacagccgattcagactacgcaactgtagatacgtattcccggggctacctgtgttgtacctatcaattgacttttttgcgaaagttccaagaacaggagtgatcctgatttgctcttattttctcttttgcatatgttcacgggaaggaatcagaacttctgccttctttcaacatcaatatgaaacgtacgcctcatcaggcagcctgcagattttacgccacatcagtcgccaagtttcttctcagtgacagatgttctgttgttttaacttttcattgaaactggatgtataaatctaggtgccagatactttttgtttcttgaatggccactttactcggtatacactccatcagaaggagttttgcttttcattccatcctcactgttacatctgtatccctctaacccaactttccattccaacttctcaggcctctctcaatgtcagagaatctggcgaaaatggcgcaaaaaattgattttgctcgtgttagtcctgacaccttcaaaagtgaaccaatggaaacagacaaacctgatgacgatgcacagtctaaagattctgccgcttttcaagctcctcaatgtctctgggactctgtgagaagtaaattaaggtaaggcttgcactgttctgagccaggaattaattaatccattattgctcctaagggaaaatgtttatttttagtcgagatgcagtaaagcaatgaatttattcgtacctacttctaagcttctagtgaaagacaactttttctcattttacataagtaagtatgaatgtttaaattcggaaactatgcaggggtgcagaaagttctctgttcacttctcattcaaacatttggttttatctacacttcattgatcaaagatagatgtagatacaatttgtattcagttttttcaatgatacaaaatgggtactttacaattataactaacagcaaaaagtgcagaatatggggggctacattttcatttcacatcaattaatttttaattctctatgattaaataacagcttgcagggtctgcggctttttacgtctttaactttagttttgatgttataagtttccctgtaatttttttttctttttttcctgaatcaggaattcacttacagagttgtgtgttttacaagatgtgttgaccatcgccaaagaaaaacgctatatggtcctggatccagtacctcaagaagttccagaacagaaaccaatggctcaaatctatgcaaggaaaaaagtaaggtttcattttaattttgacaacaaaggcacataaaaaagatgtaggtatccctattccgataagtttaccctttttctgtgcgtttgccgataatattcatggtatttgcacaactaggtcaaattaaaggtatctggtggacgattgaaactttgtaattatgtcgactagaaaagacaaaattgaggtagaatgaaatcctatgatcggtcgagtaactcctcaaggctcgtctatggcattttttgtacctttatcgggctgaataatcaactgttcatcagtcaccaaggtgatgcctgtagtttatcaattctatctcaatgtaggtaaacaaaagtgtggtagacgagcacgaacaagggaatcgaacaatcatataactctattccacctaagttttgtcttgtttggttgacgaacacaatattttaatagttggcctgtcaatatccatgtaacatttatgcatctctttttcacttaaaaatcctgaagttcctcaaaagaatttcttatgttgttgaaaaatagtttaaatgtttaccaaaagtcaaggaaaattttcctctgaaaggtaaggtcccttttcataaatctggtcttttgtattgtttttcggcgtctgagcaccaataacgtccaacacatttaaaaattatctgttgaaagattaaaatactcaacttcactctttggttttctcagatgacttgacattatctaatgtcatttgagcactttaattttttaatttaattgaaaagctaataattcttaactggaacatttaaatttttcatttccgagaaataatttttttgatgctcagctctgatactgtttcagaagctccagagccaaggtatatctaatcctaaggcagtggtttttaatttgtgattatttgtcatggttccaggctttatcaggagcagcgtccgtcttactcagtgccgctgaaagattgagaacctctcaaacagaaatggctcgtaacaggacaaccccagatttccacatagagttattacgactgagacaaaattggcgattgaagaaagtttccaatgctataattggagatcttagttacagaactggtcagtactaatcatttttttcattttcttttttatggcggatttatacgattaggttcttcttctagacttcagatctccgattcttcacccaatcaaaattcaatgatctaacaaaagaattggcggcaatcaaacagatgaatcatcatcatgagaacttacgagaactgacgagactaattttctgtacctcccattcagtttgctcttccctttgtcttctcaaaactatatgtgtggagctcctcatcagtgaacaaagcattatcatgtctcttccaaaaacccaaaaaatataggaacatagggtctttaattgcaattaaaatttagaaaggtagaaaaaatttggaaggcctcaatcttttctcttaaattttcaacttaaatttaaaggctcaagtatcgcttcaattttcaatcagtttctcaaacctgatagtttagaaaattcagaatatttttcccaggactgtggaaacatctaaaagaaaaacactatccatctccctatcatttgactgcagtttttgcgaaacaaaatttatgaaattaggtaatcataatttcatttctatgtattcattttcagcgggatcaaaattttctcagatgggtatgtttgaagtaacaaaagcagaagatgatgcctcaacatcgcaagcctccagtcctcctccatcacctggacttgggccaccaatgccaccaaaaccaccttcagccctcagagtcacagttccatcagaattacagggagtggcatatattatggtattatgtcgaaaaggtaatcacaaatttagttactttcatgtgttttaatctccaaacactatatagtgatatacttgctttgaagtctccttcctcacagaaaatcactcctctcctagcatgaatgaacttcacaactcttcactttaatgatacatcattgattgagtgtcccagacccaccaacaatcatgttttttcataatcattctctttaatgccattatcactcctcgtaagttggtgaaatatttcctgttgggtgagtatctcatgggaagagtattttggttagacaccgttagttttttggcccaattgtgctagaattcagttcaagcggaaaaactgaaattctcattttagagaggaaaaaatcatgcaagctgaattgcccacaaagaggtacgctgttttttgcagttgtagttacaacttttaacgctgtttgaataattcgcttagtagatggcagtaggtgcgcttgttgtcgtggccacaaacccgaatcttggactggttttcacaacctgtccaagcttggaaacaggaaattagtgggctatgcttcactgatagcctgtctgagtagaaccgaaattcgtctgctgcagcctttctgattggtgacaactagtgttgcaccagaacttttgctcacatgagttttttccctccataatgagaatttcagtttccaagtgaactctaccgcacatttgccaaaaaatcgatgatgtctcaacaatgtgaagcgcacaaacccagtcatggcaacagtttggttatcttatatataggtgtttggttttttctctctctcactggaggggaggagcaccttgaaacctataaaacattcagtccgaaacttttatctcatgctttttttcttcaattggtctgcatcaaaaggccttgaagtttagaaaattaaagaacaaattaatgagctaagaaatataataaaataatgacttagtccaaagaaaggctgcaataaaaaacgagagacaaaaaaactgaggcgtttcgaaataattacaatctcattttcaacctgagaaaaggcgaaaaatgagtcgtcgatttgatgttatttagagaccaagactcttttgacagactcatagacttgagtttcagtctcacaataacaatgaattggcgatccattgtttgctttttctccagctgaaaatgagatcataattatttctaaacactgcgggttttttaaatctcttgtattttattgcagcttttccccggatcaagctgttattttattatgtgtaggaaaatattttgctcaaagcattttgtcaatgagtcaagcatcatttaaggctaaaggaaggaggaataagaatctttggacaaatagcatttcctttatgagcagaatgacgtaacttaatccacatacataagacctaatctgattgtaattatcttgataaatttcaaaattacagatcaagaagatttaagtgtatctgctaatcttctgggctcgtctgcaccaagtgcaaatccagatgttcattggcagcaaaaacttgaagcagctcagaatgtattgttctgtaaagaactttttaatcaattagccaaagaagccgttcaactccagggtcccattccacatatggttgttggaaatcaaatcatggccactgtaagtttacctaacttggttttgtgaatatcttttcagttatcaccagaacacactacctgaaggacaacgcacagccattgtgctgacctacaagggaaaggatgaaaaaaaacaagcagtagcaaagtttttccgtgaagttcccacctgatgacaaaaaaattcccagggaattgattctgaccaactccaacttaacttagtttgagaagcaaaatagagccagggtggtggacagggtttcgacctaacttcttagtaatctctagaccaaaaactttacttcagactgggacattgtaagtctccgcttatgtttcttttctttaaaaaacaactaatcaacagtttccatcgtaattgctgaaaatttatctctcactaaaagaaaatcacaaaaaattgcgaagtaacattgtgattagttttccttgaagaatatcaaacagagatttctaagtgttacaatcgagttacatgttcttcgcatttgccatcaatatcgtcttcagcaaagttaggacactaggtggcaagtcctctggatctttgttgacagacttctcttcgtttccaaggtccttccgggaattcagctgatcatcggattgtgtcatagtggaggcggtggagaatctaaaagaggaatcgcccctcctccgccaaaaggtgatcatgatcatgtgctggaacattctcttcatcaacttcttagagaggtgcaccacaaaaatactcatcatccgttcccgcatccctccagtgggcccctgggacccagcaagaagagagcattggcaggaccaactgctgcggaccggtaccagctgttagagatgaccaaaaggttagcacttgagagcttagttttgatatattacggttcctaaagattcttgctaagataatatcaatgcatttattgtaaattttaaaaaaaaaatgcagcttagattgccttattgcaaatttcctttcatatttttcttcagtgaaagaaccagccacttcttattcgtgaaattttgaataattctgttttcttcatccgtgtatcctcttcaaatacttattattaatgcaaaaatatccataagcttatgtcattttttattgaataaaggaaaggaagtaaaagtggaaattttgaatcgtcgtaatgaggcacctaggtttcccggtttcacaatcgatatctgctctccttttcaagagaggagtggttggatgtatcggaaaagcctaaaaataactctttccaacataataggtgcttcgtatattaatctattagaagaaatatctaatatcaattcatttactgctgataagaaatgaattaaataaaaaattaacttgatcgtagttgttaggtttattattcgtatgttttgatgataaaacatttcatgtctcaatgaaatgttttgaaaatagccgaaataaatttattgaattgatttcgatgatttttggaaatgttcacagtaaaaccatgcttgaagaaatgatcgagcagactcaacatttcttcatgagactgcgagcagaatatgtattagatacaattgcgaaagaggtaaaagaccctctcattgtctcgcactggaatgcgttaaattctccaacccagtcttgtgtgaaaatcaccatcatcactcatggatatgaagtcattggcaaatcctctcttattgttcatgtcggtcaaaaatccatgaagtgtgtttgcagagatgggaaagtgatgcatttatcctacgagccacaagagttgcgggacctgattttctgccaggtatgtctagtaaccgggatgtttatatggtctaattaacattgtttcattgatataaatccacttgcttataattacagtcagctttctagtttttgttgagtaattatgtcaaaaatgaaactattttgaactctgaatgaaatcgttttgaggaaaaaatggaacaaaaatttaaatcatttgccaaatatacttgcatagaatgtcaccttttttgaatggttgagtatagtctactttttttcatgaggatattttaatttgattgtagagctgtcattgcccctgttcgaatgagctcaacttattcttttcctgagctacactgggctaaacaattttggctttgggaattttctgtatgtcctcctgttttttttttttttttttttttttttttttttttttttttttttttttttttttttttttcacttagttctatttgtgtttcatttcatttatacttccacagattcatcaacaccaaataaattctgtacaagctcttggaaggtgtatgggatggcagcaccttgcgaacagcccccatttaggaattggacctgtcgaacccctaggcaacgccagttcttgcatcctagcctctccaatgggtgacaggtaatttatcattctctcttcatctgcaaaaacggaataggtatatagcagtgtatgacctcaataaaaagccgcttttaaatatagccattaaagaagtggttcaagtagcggttgcaaggattttttccaaaatgcagccccaaggtaccttgtctaaaagtgaaaaaactaatatcctcactgttccgaaatgttgggctaaaaaacggtatctatctaatacaacgtcagttcattgaagactaaaattggctgtgtcagtgattgagttggctaattattgaagtggtcttccaatacagaagggcaattgcatattattttacgcagtgaaaggcaaactgtcaagtgcattcatctcttccactgttaaatggcagaaatttcatcgatatatctaccagtgtcaacagttctcttcttagaaatagggttttaaaatgaatggataagactcatacttttgatttggttgttttctaggattattgccattcgttgtgcaccacaagcgggacctcaagttttcattgctcactcgccgcgaaaagatttcttcagtggacagctagtcaaagagcgcaaatgggaaaacttaggtgggcctttcaaagaggttcgttgggacaaaatggaagggaaaaatttcctgaacaaaatggaactgctcatggctagtttaactagcaactcctaa

SEQ ID NO: 17 - DNA, 26727 bp, Bemisia tabaci
  source 1..26727: mol_type = genomic DNA
catttttcagttttctaacctataagtaaattccaggtttacttgaactgattttgactacggttctgcgattacgataattagaactgagttgtgtcgtgtacacttcacttcaatctcgttattagtttggtagttgtaaattaagtaaattacttaaatttttaaaaaagcttcataaagttgtcaccatgccagctgaagagaaaacatcaggtatgacactccattcaatgaatcaaaaaatctttgtccattctcaaatccaatcctgcacactcagtatggaatgataactagagcatatgtttctgaaaattcatggatgcgtttctctctcattacctcaattattgagcttactttcattccttagctcattcaacttgcatattgtaattttcattttgcgctttgacattctataaaatatcagcctcattgctcagctcttgttccattttagagaatatgttctcttgtttcgccccacatgattcctaaatactccgcaatctcgttttgattcctcagccacacgtagccatcaagcaactgaggaccttaccgatcaaacatcctatacccatgttaacggtgctaagattgtgcattcattcagctatttagtcggtagagagctgtgagctttgttttgcaatttgcctcaaattttccttctattttctgaatattttggcagagaaatttataatgtgggtgatttcaatacttggaaaaagaaaggaaaagttgcccagttttagtatcgttgacatgggtacaaactgttcagtcaggaaggtcctcacctgttctggatgtatccatactatgtactcctggagttactgtactgagtcgaagaatgattcagaagctccaggcgcttatgatagtgctgtaaacttctcaagtttgccgtgaaaagctgtgggaaaaatgcactgctctcgttgaattcaagtgctcttctttggaagtgctgtcttcgtcattcctggtaggagctgcaaagcaattaaataatccctcagtttatattaatactcttacccacccgaacaagactggcttggatctgtagcatgtatcatcatggagagacttcaggcaggcgggtgcggtgtcttctacaaatcaccactcagaggtacttcaagatatcacctccagctttgctggacattgtcatgtagctcatacctctttatgaagtgggtgatctgatatgatttgaatatgtgcctggcaagacagacgtccattggactgtacattaaagactttaacttgactacagttgcaaatccaacttttatatcctcattgccatttgacgtatcctgtgaaccagagaggaaggaagacaacatggacttgggagaaacagatcattcatcattgattcagtcaagaggcacaatttacaactaagtacgtacagcaagactggaggagacatcttggattgccttactgatggaagctatgattggtggaggacatcacacccagcagtgttataactggcagcagaacctcctgagtcttcattcacgagtctgataaaactatggatattataaacctatagttttggtggcggtgttaaagtgttctcatagcagctataacagatccacgttcaagatttttatctcaatataacgattgaatttctaccgaagtatatattgattgctgactttgcaatcaatatttttacttccttttaagtaatcattctaccttcctctgtagtgaagtggcacccgaactaaagcttattcccaccagctctgaacctttgaaatgtaaacatttagcaacaagttaaaattaacttgttgctaaaaaatgttatccaacatctttcccttagaacagaaatctaagatatctgtcaatcatgtaagtcagtaaggttgaaacttttattcacaaatacgctgagataaacctcagtcaacgattggagcattgtaatttttgtttctcttagtcaactctttactaaaatttattcaggtatactgcaagttttttgactccgcaggaaagcttttgctatagcttgctaattattatgatttcttatttttctgcaggcaaaaagctgtctaacaaagaaaagaagaagttgaaactagaggtaagatattcatcccattttccatgttgcaagttagactccattacttacacagaatggatatatcatacagagggtacctctccttatataagttcgtcaattacatacattatatggtagatattacttacctcagtttcctttgttccatactttccttttttgtttgattttttaaagagaacaaagcaacagtttttctgtaaagttcctgtgaatttttccccttaaatatttatcgaaaatttcaaggagacattatggatagtttcctttaaattagaagcaacataatcaaagagttttaaacatttcaatttaaggatgcatttttggctttggccatctatgtacatgctttcttcaaacctgcctttgtccataaattttttctgcttaatagagtccatttaatcatcatagtctgcgtttgttgacctgggccattatacatctccttggattgatatcctgccagacaattaaacatattatttaaaacgttgttgttcaaattcggacacctagaatacgcaagttaattaagtaaatttaactgaatttttgtgtctgtcaaagactatcttaacaaccatactagatgcagcatactctctgaaacctgtttattgttgatacataattttaaacaaatttatcatacttgagttgtgaaaatgcaatctaatgtgacgttatgtcttcaatgttcaagtcgtcctttgcaggtgaaagttggatatgattctaaatgagtttgagtttgatatgaaacggaacattttttgcttctgtgccaaaatatgacttcatgttgccgttcaatttgtaatgtaactttaacttgctgttttttttttttttttttttttttttttttttttttttttaaatatataaaggaggaatttgaaactaagccagcaaagtcgaagaaaggccggaaacatgatgactcagactctgaagtagaaacgtctcagaaaccagcagtgaatgatgatgaagaaagtcaagcatcgggtacggaattctatcatttcgccattcatgatatttttgaaaaaaagaatgcaaattacctaacacagaagttttctttcttcttttttctttattttttgtttctcttaattgacctgaaatattcaattcttaaagaattcaataactcgtaaaaaattcaaaagaatttgatctaggacaggtctatctgcttcatcaagatagtgcggttgaaaagttttttgaataatttaattttaaattgcttcctaaagatgcagaagcttctaagaagttaatggcatgtaagtatgtcctaaagttgcaagtgacaggaccagccaaaagttcacagccatgtagattaaacagtcgaccgtaatggatccattgcacccttttttttaaattcattgtctgaaagttattagtacccaatctcgtagaaaattgtcagatttttccaaaccctagtttgcaaagaaatactgttttgaaaatgccgaaaatgggacctgtttgatgagccaggcggcggaaggacgtctgctgattggctgaactcatattcaggcatcgccttactaagtacgtcaactcgactatcagcttttaatttgtggaattttcattagctttttctccccctccaaatgacttttttaactttttaatgaacttgtttgcttgttcaccaaattatttgtaagttggaaaaagcatacaacaaccccctaaaaattccatgataccaacctattatgctcgcaaggagatcatttcttttggagcccacaatgcatcaataccatgtcagcttatgaacagaactctgtcttgaataacttcaatatgttaatccatggtgtttcaggcaaacctcagaagaagttatctgccaaagaaaagaggaaattgaagaaaggggtaagagctcatgaaattgttctactatttttttaacctttgccaccaggcctgagctcctgagatttttgtttcttcatttataaactaggtaaaacaaaaccaatcagatgaatgatctcttatctggtcgatactgttatcagttatatctgcaacttggttatgatatgattactgttacacttattgtcatcacatttctctctctaaaaatgcagtttgaaattgataaggaacatttatttccacctgtatcttattaacctccatggcccaagaaacgctaggacagtccgtgcgcagatccctttgcctgcttggctgctcagccaccccttaccttctggagttttgtcttgatggcagtatatgcatgagcccagcataggttaggaattgaaaactgctgaaacattttactttttaatattttttgtagcatttttgcccatattaaaaataaattcatttttgtgagacttaaagattcaaaaactaatgatgaaataataacagaagcgatgtaagtattcaagatatatcttgattaaaataggggtgtgagcggcgattttggagacttttgttccagcatgggggaagaagcagatgacattacttcttttgtaaacaatctgcatgctttttgttggaaattagtttaaatgacagaccacttcatccctagtttatattgccacataccttattaatttgaatgaccaccacaacggcgctatcatgtaaaaacgtggcgaagtctaagcctaagaatactcaggggtaacccctggagggcagagctcagagcccaggatatcgagtgcagggctgaacaggttaatccttaaatcacatggaaattttaaaatttttaaacaatgatctccaccttcagacttatttatttcagttattttggttgataaataaaaattattggtgcttaccctgaaattcagagaaaaatttagtctttaagtactttttcttgatgaggtttttttactggtttaaaactaacaattcagtggtatacctttaaggactcaatgcagaaaattgaaaagacttacatttggtcaacaaagttcaatgtgaggtcttaaaaaaatcctagttgctggaagaggagcctatcaacgactaaagttgaacaacgcgtatctcagattgcaacaatgttagtctctgctcatgttttaatttagaggaaagttggatgttctttttgctaaaaaggactatgtgcctagggtttgtgtgcaatatagttccttttagcataaattcgcccgattaatcaaaaattcccactgaagttctccggaaatttgccccaaaattaggagggggcactttgcgtagtttttcttgaagaaaataatacatcaccagagatttttaaacaatgccctgcagatatgcatttttcacacttagtcattgaagtagtgttctggtatccaccaattctaaaaatggttagatctcttcagaatgtgttggattttctccagattttctcttactgtctaaataagaacacagtacaacgccacaattcgtgcacaatgtcacatctttatctgtacatagtaaaaatcttaatagaaaactaggttgaatgattgttaactgtactaaaatttaggatttttgtttaaaaaagctacacaatacctcagctctaatttaaatttatcttactctctttcattttcacagcaaatggatgatttcaatgactctgattcgatatcttcttctctatctggagttcgtaagtattacagtcattttgtttctcaagaaggtttgaatctatctgggttttttttgcaactgtcaatgctattattcaccgcattgtttgttcatagttaggttattgggttccaaagttctttaagttcctggggtgctctcaaagctggaagtcttaagcttttagtctccatgtttttcaaacaaaaaaaaatctaaattgccaaaaatgtcatcaaataccctgatttctaagtgcattgccaaataaacagcgttgaaatatatatattcaatataatttggattatttccaaatcattgtcacaacctttgaaagcaaattatgttacatcctaagaattgttaccttttctatttctctcacacaagtattgaggacttctaatgagcatctcctactaattgtaagaccaggaacatatccataataagctttttcttttttccagagaaagctaaaaaattgtctgcaaaagataagaaaaagttgaaagatgaagaaggattcaggagtaaggagcataaaccaaccaaaggaaagaaaagagatgatgatagtgactcagactcaaacgtcaaaaaatctaagtcaggaaaatcaggtaatgtttttgcatcttttattgagtcagatgaagatgagcctgttgcaagcttagctcccaaaaagtccagtgccaaagaaaaaaagaaaattgagaagaagaagaaaaagctagaaagtgacgatgaaagtgatgattttagcatcagtaaaaaagattccgatgaagattcaagcgcaacggaccgcataggaaaaatacccaaaaaactaacagcgaaagagaagaaaaagttggaaaagaaaaagaagttggaagaaagtgctgatgaaagtgatgatatagatgtcattaaaaaagagaattctaagaaaatagaagagtctgatgaggattctgatgattcaaaaccctcgctcaaaaaactatctgccaaagaaaagaaaaagttagaaaagaagaagaaacaagcagtaagtgatgatgatagtgatgatttggatatcattaaaaaagaaaaaactaagaaagtggaagagcctgatgaggactcagatgcctcaaaacctgtacttaaaaaactatccgctaaagaaaagaaaaagttagaaaagaagaagaaacaagcagtaagtgatgatgatagtgatgtagatatcattaaacaagaaactgcaaagaaagcatcggactctgacaatgaagcttccactaatgcagcgcctaaaaaactcacagcaaaagaaagaaggaaactggagcggaaaaagggatgggaagaagaggaagaagaacaggatgaggatgtaacaaaacccaaagaagagaaaaaagtagaggatgtcgcagaagagaaaggtggtaaaaaactcaatgccaaggaaagaagaaagatggagcgacagaaacaatgggatgaactcggtgaagagaaaaaagatgttgaaaatgttgaagataaagctgagtccaaacctgttgaagtgattgaagcagcaattgaaaatctgcagataactaaaggaaaacagaaagagaaaaagaagaaaaaagacggtggtaaagagaacgaacctgatgcagagttaagtagcaaagaatccattaaaaaggatgaaaaagttgagagtaaaacggtgaatgatgttgatgcattgagtgcaagtttagatagtatgcagctgaaagctaaggaacccaagaaactgtccgccaaagagaagaaaaaactagaaaagaaagagaaaattgaagcagatttcaaacggcagatgggattacttgacaccgaagaaggggagaagaaaaatgatgatgaaaaattagaaatcaaggaagatgcgaaaaaagttgaaggtagtgaagcagatgtaaatgaagaaaaagttgaaaaatctaaagaaaagaaaaagagtaaaaaagaagtgaagttcagtgagccccaagaagaccataaagatgaaatagctgaagaggaagcttccaaagacgaatctgttcctgaaatttcagaggaaaaaggagagaaggagaagaaactcacacacaaagagaaaaagaagctgaaaaaagaaatggaatatcaaaaaatgatggagttaacaacaaagaagggtggacaaggtcatagtgagttagactcaaactttgctgtctcccaatccttaaaatcagctaaccaattagcagcacttgagaatgctgtagatatcaaaattgaaaactttagcatatcggccaagggaaaagacttgttcacaaatgcaacgcttttaattgctgcaggccgcaggtacggtttagttggacccaatggacatggtaaaacaacattactcaggcatcttgcgactcgagcttttgcaattccgccaaacattgatattctttattgtgagcaggaagtcattgccgatgatacattagcatatgaagctgtattaaaagcagatgtcaaacgaacagaacttctgaaggaatgtaaagagctggaagaaaaaattgagaaaggagatttggaagcacaagaaaggctaaatgaagtatatgaagaattaaaagcaattggtgcggattcagcagagccacgagcacgcagaattctagctggtttaggattttcacgagccatgcaggatcgtccgaccaacagtttttcgggaggttggcgaatgcgtgtctctttagctagagctttgtttgtagaaccaactcttttgttacttgatgaacctacaaatcacttagatcttaatgctgtaatttggctggacaactacttacagggctggaagaaaacactcttagttgtctctcacgaccaaagtttcttagataatgtttgtaatgaaattattcacctagacatgcaaaaactattctactacaaaggaaattacacaatgttcaaaaaaatgtttgcgcaaaagcggaaagaactaattaaagagtacgaaaaacaagaaaagcgtatcaaggacttgaaagctcatggtcagtccaagaaagctgcagaaaagaaacagaaagaggcgctcacgaggaaacaagagaaaaatcgtagcaaagcaccgaaagcagacgacgaagacaaacccacagaattgttgcagaaaccaagggaatacatcgttaaattttccttcccagatcctcctcctctccaaccacctattcttggtctttacaacgtaacttttgcgtatcccggccaaaaaccactcttcattaattgtgatttcggtattgaccttagttctcgtgttgctatcgtaggtcctaatggagttggtaaatctacgtttttgaaacttcttaccggtgatttggagccaacaaaaggtgaagtcaaaagaaatcaccggcttcgaattggaaggtttgaccaacacagtggagaacatttaacagctgaagagacccctagtgaatatttgatgcggctatttgatttgcagtacgaaaaggcgcgcaaagctctaggaacgtttggtctggcgtcacatgctcacacaatcaaaatgaaagacctttcaggagggcaaaaagcacgagtagctatggccgaactgtgtctaatggctccagatgttataattttggatgaaccaacgaacaatttagatattgagtccatcgatgctctggcagaagcaattaacgagtataatggaggagttattatcgtttctcacgacgaacgtttgatccgagaaacagaatgttctctatgggtcattgaggatcagacgatcaatgaagtcgatggagacttcgatgactacaggaaggagctgttggacagtttgggtgaagtcatcaacaatcctagtatcattgccaacgcagctgttgaacagtaaatttaatccagtcatgaggttcaaaagtattttttccttgaaaacttttaagaaatgtctttgattgaaacctcagaatgatcttgtgtcaaccctaaaagtaaggaaagcaattatcaatacctatccctactgcctccctctctcaaaaaaatggtagatgataataagtaatgttgaaaaatcccaagttttaaagaatttttcaatgttttcttaccttttttacctcattgtgtaacaatgaattcatttcaataattttcggcatatctctcctagactggtattttcttaatctccctgctgaaaatatcagtgagtgtttggtttttcctcttaagatgtacaactgtaattacctaccagaaactcaatcctcaccattgttggtcatttaaagcacagaataagtcttttacttcaagcagttctgctacttttttttgttaattttttttttttttttttttttttttttttttttttttttataatcattagccgtactacttttcagctctctcaatcctattaagagttataactctttgctcctctgtttttagcttagaattcgtaattcgtcctgtaattattataatgagtcaattttttcatcttatgacttttttttgtgtaacattctttgttacagaatatatttcactgtcaaataaaatgagattagtctaatgggttaatctattgaataggaaatttattttatctgattctcaattctcatagaaaactgaaaaggatgacgtagagtttcaaaattgcaactctttcaaagtctggaattctaatgcttatcaccatgtatcaacgatataccaatgtattacagacttcccgctgcgagaaaaatttttaaaaagactggagtgttactgtcaaaacgaagttaggagctctttaggtcaattttatgtttaatttcttgtagataatttaatttaaaatgtattactgtattcatagttctatttctttttaagtgagaatttgcacagtatattttgtcatactcctaaagttttcaacattgatgtcagtattttttactttctcgcttctctagcgggtagaggaagtatttaatttaattgaacaaataagtttcaaatttcaaagttccgtcaaaatatgaaccagagctaagtaagagtttgcttattttagctcagatattacatattattataattttatttctgaattaagtgtttaatttaagaccgttttcttgttcatgctcagtggatttgtccatccgttcttaaataattagaaaatgagggaggacagtcacagaaattttctacagacagaatacttaggttgaattgattgcagcaagcaaagaaatgttactttcgaagtacaaacgttactagcaatcatttttccagtcatgaggaggctttaggtaaaattaagtaaaatcgatgatgaaaccagaaaataagtatccggattgcggtgtttcaacatttctgtttcagctttactttttcagcataaaactgtaatatttttgcatcaaatgaattattcatctcaaagattattattctcatgaattattctttgaatgctgaaagaaaatagttttaatttatgaatataaaattattattttgtctgaattaaaactgattttgccagaagttctcaacatcatcaatgaagattcaagcttctcgagattcactttcaaattatgacaaaaccgagtcaactaagtgccttcttttgtgccaagcatcattatttaaaattattttactacggatacgctctttgagtgacaggatggtagattattactggatccacactaagcttctgataaatcaatgctctgattctccctcagaatattaatgcaatagtttgtacggaatgaagtgaactataagggtcatcaataccactaccgctagccaggtaaatagcaatttttcaaactaaaaattagcattcccatcggcgcttttccagactcaaatcaagacacccagcgtcatatatcctctgctgaggccatggaatgtagttgatttttgcacacaacttaaatcttttttgcaagaaaaaaaataaaaactttgagaaggatcgttcaacagtacatttttaggaatgaatctacaaggagttgaccccaaaaaaacaaaatcatcttaacaaggaaaaacatcagatttgtaattttacaacgtttatcgcagagttttcaatatatatttttttaaattcatgcttatcaaagaggagactgactgtcggaaactaaatttatcattctatatggtcattctgacgaggaaaattcttctcctctcagtacggaacctttttgagacttgttcacttgcaactgtggctctcaatggtgattttctgttaatctgcaatggcgtatgcttctgtaaactgtaaatcttctcttgaagtgttgaatgtttctgaaattactgtaaaacttgctgatacttatctaatatgtaggggaaaaatgtcttttggcgtagaatagcttaggaaagcttccacatccaagactaatactgccgtgctaaggaagaacgccgtatgaacattcgagagttgccaaatttccttccacaaaatgatcatttttaaggaaagttatgaatattttttctttaaattttcaaaatctttaggttaaattgtgaactaaattatctgaaaaattcggaggaaaacattgataaatctatcagtaaatttgcgttttatggaaggaaatttggcaacgcctgaaggttcatacggcgtttttccttagcatggcagaatacctttagattggagcaatatacattatacgtacctatgtaaacgttcctcataagctccaaaataaagctgttgtttttagaatcaaagcttggtctcaggcactactgattttggtaaaaaaaaaaaaaaactattcttttttttgttagagcaattgtgttttcctcacaagcaacgttataatagtaccaggggtcttagaaccagtgtaaggagaattgttttggttattgtcatcatcatgaggttaccgaaacaggaactttctcttcttgataatcatcttaaggctgtgttcgaacacttatttttgctatcttgcttgtttcaatcaacatttcagatcatgatgaaactgaattggaatcaaacattgagttacgttccgtcttactctgtaaaataaaaattggatagatagttattttttgttttgtaagaataacctgttcatactgtaaaaataaaattttgttatatttatttatttaaattgagatcattatttccttcgaatgtttttattttaagtactcaagcttgatccacttctcaggcgaacagatggtgaaaattgaaatacatgtacccagtttacagatttttaaaatcgcctctgttctcagttattggagaaaaaaagttggacatcacactttgaaatttcactgataagaccgtttaaaatgaagaaaaatcagtgaaaattgcaaaaactaaagatttttctgtactgatgtaaaatgtggtgatgaatctgcaaaaatggtaatcgaggtatgtgtttttcaattttcataccggtgtttgatgtaagctcatcatttcttgacggacaagacaaattctaaagcatagtctttttttaagagtaaaaaagaaaatttcttataggcacagtagtatactattaggaatccagaattattgcaattctatggacatcaaaacactttcttgatttttcttcataatttttcacccatagtgaaactttagcctagatttaatatgttttgctcacttaaagttcaggctcacaatgaaatctaactatattgtcatcaaactagacaggcaacatttcagcagcagcgtgaccagttatagtgggaaataaattaggtacagcaatattgccgcaaaaatattgctgcgttgtttctttgcaatgtggatacagttgtataacacatttgggccaaaaatctttttttaacaatttgtcattaagaaattttaagagaacataatttgcggagatgaggcttgaggctgttggcatgtgtagtcctcatgactcctccccctccccaatgttggcttttttttaaaaaattaattcctcaacagcaactgttcactaatatctacggtgaaaaaacaaaaccttgttttctgaatggtttgcaacttttgcacatacggtatcatgtaagtacataactctttcaaaaattagtgaaatcaatgaaattactcagttgtgaaaatttcttcgctgtctgaaaaatattttatgaaaattttgagtaacacaattgggttgtttctctacaaaaatataaaagtggaacgaaaatttaggaatatactcaggtcggtaggtatatagcaatagagatacctacgtggtttccaagtttaaacataaatatgctgagatcaagacgaaattggacatgattgcaaggctttgggatgaaatgtggatatttgacgtaagtatgagttcaaatggggaaaattttgatttgtcgacattatatctgacaatgaggaaattggaggaagttatttaaaatcagctttgcccaggatatttctaccgatttgcattagaggcatcatattttgagcattttttgtccgtgacaggggagtcatactcattcctccgctgcactttaaaggtgccttttaaggtgctttatgccagttcttatataatcgagggattttttgaaattctaccttgattctacccctccctcccaaagtttttctttctttggacatcattagctccccttaaactttactctcaattaaaaatagtataatccgtggattgatttgaaacatgttcaggtactatctcgaaattgccgggaattttccgggcaacagcggaagtcggctcaatccccctccccccttcctaacttcacgctttgccgcgtgttacattttaatgacgtaagatgaatttcaagctctgattggttactgctctctctgactgaatgactgataaggattgcttttattctgctatcaaaataaacaataacagtgagtgcgagtgcagtggaaaaatgcaagagggctgaatgtccggttctattttgatttacctcaaagttttttttttttaatttctcatcccgttttcagtcatactccgaataaggcagtaggattgaaatcgaatcaaatatatcatgttcgttttctgagctcagataacctcaatggtaacgtattaaatgtgttagttaacaggcgtttcttttgctagaaaatatcacggattttgatgatgtaattgtggtttttaagatttttgtcacactactgctcctcaaattcacttatttctgtttctattcaacagaaacatctttgtcagtacatacaaatagttagccagggattgaccttggtttaaattttgattgaacgtaaagattatccccggataggtacctacttctttccttctgcactggcaagcacaaccacgatgacaaagatctctattttctgggtgcaaatttcattggaaagaattccttaagaaagtctcagtttaagtgctttttgcaaggatcgatgaatttcatttggattcgcaattttcaatcctcaggtttcagggaatgagacctcatatgcaggatttccaagaatttagtatgtaacctaatcgtagaactaaaaaagagactaaacctgtatcagtagatatattttgtgatgtaggttacctaagttctgttcgtattatatagtagtaattgcactgttacatggtacattgtgtatgttgactgaaatttccaaaccacatacctacccagtttgtgatgttgcagacttcctgtcaaactatctttttcaaatggaacgatgtttaccgtaaattctttcaaatttccatgatattgcttctctgtgagaagaaaattcattgaaatatccaagaaatgatgttgatttgttctcctttaaaagaataacatggtgatagcacagatttttaaacatgctgacaagatacatggtttggcagtttcactgttgacgtactctatcaagtgaatagtattaaaatctcacccaataatttgacgctgagcttgtctataatgacgctgtgcttgtctgacagttaaaatacttggaattttatttgttaatgaaaatttctttaataataggatactccagatggattactcgttagctttcgagaggaatggcagaaagagctggagctcaattcaaatccaccctcaaaaggatctaaaaaattagaagagaagttagataacttcagcaacttggaagatgaagtaaatattgttttttaatacctttttaatcctaattttatatcatattttatggtttggaagcaaaacaattaaatatccttcagagaaacgtttcaaagaatgataaggtaaaaagaaattgtgctcttaaaacagggtttgaaattaaagtggacgttcggaaaaaccgcaaccgcaaagtgccttttcagcacacaatgtttcaactttcagcattgtacctaccaaattttgtagattttaactctaagtttttctttttcatcaaatgtaaatgttgatgaagttgcaaactaaaatcatccaaacgtttggtcggttggatctatatttggctgatttttgtatacaaatgcttgtaaaacatctcctttaagtggttgtactacaaaataactcacccgattggaaagccaaaaaaagaggtaaccactgtcctgaagttgagggacagcaaattgctgctagtcccaggtggcaagatagtaaatccaaccctaaaaattaacatgttacctggatgatcacatacttaaaatgttgacttgactgacaatgaatggaaacggaggtaacggaagtcgagatctacataatgatgatctcaaatcgtgaattttggctgtaatcgagattgaaaaaactacctaacgttttaaaatctccgaactttttagtatgttttgaagtccatatcttttattttcttggtttcaggcaaaaacactatttttgaaaggtgctgaaaatgagcgagcaggcaaacattatgaagccattcaattctacaaaagagctgttcaacttgttccagacatagaattcagaatttataacagtaacaaaactgtccagttcagatcaactgaaacaggtatgttggttgataagtctaaatgttaatgaccctatccttctgttatgattaatttaccatcagacctactatctgtatgcttagcttaccctcatccattgtttacaaggcagagcaacagggttatttttattgcaaccctgcaaagtcctaaaaacatcttttttttctgtagaaaagtaggtacataattgcatgtttttcatcgtaaatttttacctcaaattaaattgcttgaaaagtttaattcaaaatgaaccactctgttgggcttgacttttttatataactcccacgcccctggtctggtaccaccattgacgtataatacaatctagaccgcgcattaggaaatttcggcaagactagagtcccttcaggcgagacgataggcaacccagcaaccgcagtaagtgtaccgaccgagacaatggaaatgccagtcttatcagtgccgatacctgatacgggtacacttagctcgtttatccggcggtatcaactaggctgaaggtgcgtctttgcccccctagctgtcttaccttccccgcctaaagtagggcccaatgcgcggtctagattgtattatacgtcaatgggtaccactcagcattcttctctactaattgtattttaagatttccagccttaatttttatacccacttttagatttgtcagcagtatttttatcatcaatattttattattcatttaggattgacagcccttgtcctctcaacttaaaaatttaatgtgcaggtttaaatctgacatgcttttgaagtgcagtgcttgtctgctgatctgaatgtgagaggatggaggtttttctcccaattaaagggtttttgaattacctcatgagtattcaaattttagaaagcagtttctaagaaaactcaaagtctaagggatatttaaattagctctgtagcttaaattagataaatcaattgcttgataattagaaagcagttggcaatttttcaaagttcattcttttttttgttaatctcaagattttacatcaaaacgaagccacaagaacctttttgaaaaatagagcgcttggttctgtcagtagaaatacagatcgtctgatcctgatctaaaattttagaacgtcaaggttatgccattttgaattacaaagctgattcatcaactgatcagaatcaaaaaatttggaattggcaaggggaggaatatacacagtatttttggaaatatagagattttctcacaggaaccggctttttttttattttctcaaacttaaagcccaaagacttcaaattaccaagcatcaattgtagctgattttggtaatcaagaataaatttaaatctgattcaatgattcattgtgtttcaaaaatgtttttatttcagatgatgaagatgaaccagaaaaccaatcaaatttgggtgaagactccttgcctgtagaggatgttattcttctggttcagagggaaatggccaaagaccaaaactattcatgtttacctgagaatgtacaaactgtaagtacacacagcagtgaccagagttcaccgataaaagtttatttttaccaaacataagtattaataaagagtatttagtgaaaactatttacaccaaaaaattttgttggtctcaacacattctggtaggcaaattctactgtttgtacggtttgagatgtgccaacatcagctacgacttgtgcgaaagtagcatataacatttaagtggtttaattttcaccaaatatttgggggaggctccttgagatgccttgttggctgagggatgccccctcatagaaaacagacgtagacatgttatccccctcttagaaagattcctctcaaattttgtgtcccttggactagtacagtgaagtataattttttgatggctgaattgcccttctattaacagcctaagtaatagcaaagagctatggtacataatcctgaaagatcctctttacaccatgaatagaggaatttatcgtacctctagcggcatgaggagttaccactgctgttagataattttggtgcccattcaaaaaatgagtttttttccttttatttttgtctccaccttgaaaaagtaaacacttttttctcaatgcacaattttactaattttgcctccaattggcttatttcttaagtatgaattgttatgttgaagtagtttgaataatgtattattcctttcctcacttcaggatactcacatctcagcactgccctttgaaattctcttgtacatatttcgatgggttgtctctcgggatcttgatctccggtccctggaatcatgtgcgctagtgtgccgtagtttctacctctgtgctcgtgatgaagagctgtggaagtctgcttgccaacagtaagtttatttgtctgttactttagggttccataaaatgtttcctctcaatccaaatcttagcgaaatccaaaaataatgcctatatgctgaacttttcagtcaggcagtctggttaacttcttatgaaagatagcaggaaatttccaagaaataataataaatcaggaaaagtgcctatgaaggtgaaatcaataattaatgaaaagggaagagagaaataaatctccgagagtttaaatttaccccacttcttcatcttcaaatatcacgtgtgatccggtatcctgctaccttggtttttttgcatgtgacaatttttcctgtaataataatatattttatacatatgttcagctcagttttttcagtgaaaagcaacattatctttttcctgtatgctctatatcaatcactatcccacggcacagaataaaaccccaccagaaagggaatggtctgttttccccacaagatcatggctaagtcacttttcttagtagagttcatgttgccagaagcgggaaatttgaactaaagacactagcagaagctgctaagcttgcaaaaatgacagcagcagtcttagcgggttgttgcgtaatggtagaaacagtctggacagacataggcctcttgctagctttagaaatgaaaactaaggtgtcctgctagtgcccttctagtaggtcttcaacctatgattttagtaaaatcaaagcctcattacaggaaactaagtccagaaggtaaggagaaataaaagtaattgcatgtaagtatcttcagtcctgcaaaaagtgttgacttttagatgttgttttgtcattgaggagtatgtaaattaatcagtcacctaaagttattgatataaaaatgatcaagtcagtctagaagttgaatatagatgaagaattactttagcaagactaagcttggaaatatgtaaataaaatttgaagtactttttcaagaaataataccaccatatttaacaaaaaattaaacaaagaaattcaaatgagataccttctcattctatttttgtttgtctctttatgtagctgtttgaacaacatttttgcattttttcagaatgtggggcttgaaagtgcaacctttgcaaagtccgaaacacaatcgctggcggcgcacttttgtggaaagtcctttcattaaaacatctggttgttacattagcaaaacatcctatattcgtcacggtgaaaactcatttcaagaccagtcatatcgaccatggcatctggtgacatattatagatatttaaggtttgtattttatgaggagtacataatggtcaaagaatcaaacttcatatttcagtttgccacgttggcaatttcttgttgtacagaaaactcccaactatccgaatacggtattattggaaccctggattatccgaactaatttggtaagtaggacctgacgaactgagttggatggagcatctgatactgtttaggtcaaatatttcgtgtttactgcctatttaagccttattcaagtgcaaatagctgcagtatacatttatagtataaataccctatttaagtaactactgcctacctgaacccttttactgagatatgaactctgtcccaccaataattatttgacgcatgtatcatatcaaccatccaaacttttccactatccgaacccgtcaggccccaattagtgtggatagtttactgtagagaaaactcaaaattatccaagtttcgggagttttcggatgattcggaagtttactgcattttacgttccttaaggaggcctaatcattgcttctgcgcacaatttttttagatttttctctaatttttaaaaaaagttctccgaaaatgtcgggcaagaatgttaagcagtacatattttccttaaaaactaaaatatggccagaaattttcatacatttcaatggagatctgtgatttggtagtcccccccacagtagcattttgtaatggaaatgttgcattatattgcagtaatataaagttatcacaatttgtttcataataatagattttttcataatacatgtttttataataattaataatcatccccaatgtgttcacaattttattattattatttttttttttttttttttttttttttttgaggagaaataaaaattatactttgacaagataaaattccaattttcttgcagtactatcgtactatattgtaatacatacttgggtatcaatgtttaatctctttttaaaaagacttaagaataaccaacaacctaatttaaacctcaatagcaaatattgcaaaaaaagtaccttcaccgtactttatttttcctcaagtaagagcggttaatttcaggggtgcacattttactatgcttccacaatttcgcgcgataagcttttcctcttccacaaaattttttcaaaaaatttccacaatttcgtgactccttccacaaaaagtgatgacttctttttttttttttttttttttttttttggtaaaaaatatgagattcaaagtgcagagcgagaaaagaaacggaaagaaagaaagaaaaaaaaaatttccacaaaatttgggacgtttccacattttcatgcgataatttatcgcgtgatctagtatattgtgcacccctggttaatttttttccagtgggtcgaaaaaagtcttcagatttttctgaaaaacctgaatggacatgtgtacaaaaataagtcttaggaatttctctctgttcacaggttttttggcggtggtcaggtcttaatgttgtgcactccaatagagcctgctcaaacagtgggacaacttcgccgccgatcctgctcaaataattcagtgctatcaggtcattatcttatctcagatgatgttgttacggttgtatttcatcaaaccacaaccacgcctatttctatttttggcagtaaaaatagaaaaagcaaaaatgttccaaaagaaacaacggactcagctttccacatggtaacttaagtgtttattctaaccttttctatgattgtcattaatttttaagtaagattaaataatgaacctctaaacaaggcacaaatctgagcgtactgatatgttccttcttcaaaattttaagtagaacacaatttgtgcaataaaaattactgaaattaactcttaaccaagatttgattgttgttcttatgcattggtctcaaacaatttgaattttcagctcacaagaaaaactggagcctgtgtgaatcaaagcgcgtactacaacgtattttgcagacttcttaattgagtattgttccttccccgccctgtgttgtacgaagtctaaaaaatgtgcatcagtttgctctagaaaaacattatttgaaataaaacccaatttaaactgaaatagttcatcactgtattcttttggttcttggaattttcgtatcttcatttttgagctgtatactttttaaggaatgttaaaggaaagtgagacttttttaaactaaggaggctctggtagaaaacacactgtcagcacttgtcaacagttgattttcacctgttttggactcattttgatggaaaatgagtcagttataacaatatttttgtaaagcctcagaaattcggaggattaaaaaaaaatacttcagtgtttttttttttttttttttttcagtctattttgatttttatttctatttttgacaattattttcctctagagcaaaactctactctctacaacttacgttatacggcttatttcttgtaaacttgtggtttccattttatagcctttttcgtccgaaatcgaggtctaaacagaaaaatcacttttttatcataaaattgatgttgggcatcagtaaaaatggacgaaatgaacccaagttttggcaaacatgtttttttacctagtgacatcaattgccgcctggaaacagtgacatttcaaacttacattttttttacacacactagtgttgcatatattgtgtaactttgaaacggaggggatggaaaggatggtgagaatagatgtactattttggtatacttttcaagtaggttagatggtcagaatctttttgcttatttatatttcatgaaatgttcgttttgtcccgcaggagttccaaatcctcaactacaaatctcgtctgaatgttcaacttgtctggcggcggtacgctctctatcagaagaaaggcaacaatcctgaaatacaatcaacatttgacttggcccattctagattccctccgctctggtactccagggtcaaaagctacacaactgagtctgaagttcctctgttatgatcgagtccagattaatacttcatatgtgataaaatattataaaatgactgtcatgaatgttgtgagaagcacgattgaaccttcatcttcatcaaacaggttatacaatcatttacctcaatattagtgcttaaaagacttgacacagttatgattttttcccatgatttatgttgacacacctgaaaaattcagaggcggatctagcagtttggcaacattgactttcctccatttaaacacgtgttgaataatcaatccttgccggagcacctggcccctccaaggatcaatatatttccattggtttaaatggagaaaaaacaatgttgccaaattgctggaactgccaatggaaaaatcactcttttggcccaatttagagcgataattcggttgtcaaggctcacaggtttacccgcaatagctgtgtcagctattgtgagcaacttcagaccattagtaaaatgaaaaattattaattgcaaaaattttaataggtataatatatctctgtgtttttgaaaacagatgctgtgttcatggcacaacaactgaagagggagaacacatcagtgtatttccttcggtaaatacactaataaagactgaagcttcaaatgcgctgtttgaagcctcgtgtaaagtaatactcaatgaatcagtcttctatgtcatggtattacctgataatgactgaatttcataaattatcaaagagtatcacgatctttcctgaagccaaattttcataactgattattgattatttcatagccatatggtcaaaattagatgtagttctatgaagaacataatggacaacatcactcagtgtttttccgcctgcgttggtttcatggatcagtaaagaatttaatttgcatgcatcagttgtcaaaggaagtgaaacgagaaaagtttgcaccacttgaattgattcttgcccccaaaatgtgctagaaccagctccattttcccgcagctagcctgagaggtaagaaatatattaaccttgtctaagaagattgaaatgctaattagttgtttaatttgtatgtatttcttgtgtccttttttgaatgaatgcattctaacttgttaatataaatctgtggtactaatcagggatttttgtttttaactctaatttttgtgttatagcaaaatcattataaactacatctgttttaagtaaggttatcataagaacttgatttagacagagcacagttattcgccttattttttttaacttgaaagttgacagcaggtctcctttggactggcctgatctgatagtccttttgtatccagtagaaaactacgatctttgttttaatgaatctgattaaaattaagttgcaccgaaggaagtatagctcaataatgcacaatttggcaatcttatctgctgtccaatttctagttctttccatgtgcacaaatatgtggcagcttcaagcctctaccagtttttagagaacaagaagaaaaaaattgtagccaagtaacagtgagtcaggagaaaagggaaaatcagaaaaacttgtatttcaatttctaattatcaaattttgtatctcactgcatttttccgaaaaaaagcaatcaatatttttgtatgaattattcaataccatgcatcataaaaaaatcatgaaatcatttttttaaatcataattattcatttacctgcaataaaatggaccgaggttaacaaggacgcaccaaattacactttgttagaaaataagtcacgaatagttttgaatttaatcatttgtaaattttctcccattcaaagttttgagaaaaaaggaaagcatattttaaatatgaagaaagttgttaaactttgttctaaacattaagtctaatggaggaataaaacttcaaacttctgtctcttggatcaaacttgatgggactaagtgcgtttctgtgtaactcggtcttgatgaattttggcacaaagttgatagtgttacaaactcaaattcctatctctatccttagtttcgtttttgaagttgcctgtgcgcaagaattcatacacacagctgaaagctagtatatcaatttctgtcagatcttcgcagatttcagaaaaagcaacgggcatttgtctgtttaaaaaaggggagagaaagatttaattttgtgttttgataattttttttcttaattttttatttgggtattgatgttaagttcaaaacaaaaatgtgttagtttgaattttgaaaatctggtgcaagagttgctccttgaagcccttgaatgtttgcatgttgagttctatgtaccaatgaggaccagtcttataacagttttatataagttcaaaaccaaatatctctattgtggtgtctcaaaatgtccgctcctattttaattttgaagagaaagaagtcaagtttttagcttgaaatttactcagaatgttttatgtaagtactaacattatctaaaaagccaggaaatttaaaaaataactaatgtttactaatttttcaaagatgttgaggtatctttgaaaaactagttaacattagtttggactatgataggaagtttgcaatgttgcaaataggataggtacatgattttgaagtttggtcattgatgtgctgtctgcaagtccattcaaaggatacccacacgatttaggtacaaatactgcatggaattatgtttctgttgaaaatttcagggtgacgctcggaaatactgttcattatttgctctttctgcacagagcaaaacaggtgtgcaaatgaaatcatactgttcacccggttcaatttgatttgaccttcaaccctagttatttttttgtccatgatttatgctaagtatacttttacaaatttaatctgttgtgtttcaataaaaatttagtttttcat

SEQ ID NO: 18 - DNA, 6239 bp, Bemisia tabaci
  source 1..6239: mol_type = genomic DNA
attgcctgttccatctgctgttccaggacgtagaaatgtaattcgttgtcgttggattttaatttcagctagccggttcagttaaacgtatgaaatggcctcagtattattgaacgatgctgagaaaactttcattcttcatggtgttgaggtgagtggaaattctatcatgatttgtcaaacttctctatggcaggtatcacacacgctcctgatgactgaaaggaacttatagcatgatcgaagcccagtgccattcgtgctctcaaatagttactgcccagtcaagaacagaaaattccatcagtttaaaaaataccattcctccaatgttcagttcaaaatctctgaagagaaaaacagttacctcaggccccatcaaggtttctgtcggaaaaaccgcaaaccttaaagtcaatcgcttacctgctatttatcctctgcatgcatgttacctgcaagatcaagtgaatctttatcagttttcgttagttgaatgtttttacctaaggtgattcgtcaagcttaagtatgtgacaaaggtcgaactggtatgcgatacattgcatcgatttggtaaaaaatctcagcagcttttgagtttttagtataaaaggaagttagccccttcacaaaagcctgaagaatcattctaaacccctaaattggcaaaattcagaggaatgaaagtagaatagtgtttggaaaaaaaccttgcatttgatacagaaatcgatagctgaatcggatgcgaagttttttttcaaacactagtctgctttcatttctctgaattttgccgattttcgggcttagaataattcttcaggcttatgcgcaggggctatcgtcctttcatttttcttgaattacataagtcgtccattgaaaccagcaccttgtgttacttactacactataatacaatgcctgtactcgatttcctgtttaaatattaatatcttctactttagcttacttatgcactaaaactgttttaacttatgcaggtggatttacgatgtgatgggcgcagaagaggtgattatcgaccaatggaattagagactgatgtcgtcagcactgccagtggctctgcacgtttgcgtctagcgaacactgatattcttgttggtgtcaaaacagagattgatgttccgtatccagagaatcccgaggaaggaaaactcgagttttttgttgactggtaaggcacctcatgggttctttacttctaattttcagtctttacttaaggtgattcgtcaatgtgtctgatacggtttaactggcatacgatacattgcattgattttgccataaatctcggcagatcgtcaatttttagccatagaaaagacgacagcctctgcacgcacataagcctgaaaataagtaattctaaataaaaaaattggccaaattcagagaaataaaaggagaatccttttaaaaagaaacctcacatttgattaagaaatggatacaactgtatcaaatgtgactcttttttaatgaagggttttctcaccctccaggtaagaatgaaacttctgtaaactcacattcttgaaacttaaaaaaacccatgatcagttccttgcaaccttgagtcatggttctttttttaaaaccctatagaatgtaatgaggtattgatcagatgccaagtttatatataaagaaaaagaatattttctatcttgtgtgctgtgtcgaaaatacacctcacaatcatcccaaactgtgcatgccatgatttcttgagcctttgtcttatcaatcatatcttatccataacgtttgcacatgtataattgaatgaatatctaagaaatcatggtttacagtgctctagtggatgatattattgactatcttgttttgaacggcagatacgtgtcttagttagatgccacctagatcttaaaatattttccttatattaaaaaattaatccaaaaaaaggaagttcgacttgtatagcctactctctcacaaatttacagttctccctccccttttcaagcacagttgcttttcttttcattcaattttatgtctcttttcagctctgccaatgcaactccagcattcgaaggtcgtggtggtgaagatttagcaaatgaaatcagcagtagattgagccgtgcataccagtctttacctcttgctcctctgtgtatcgtaccaaaacaagcgtgctggaaactctacgttgacatccttattttagagtgtggtggcaatttttacgatgctatctccttggcggtcaaagcagcactattcaacactcgtgtgccgcaggtcaccggttcatttttagatggaggtagtgttgatctagaagtttccgatgatccattccaatgttggaggcttgatataacaaaagcacctgtccttgtgactcttagtaaggtgagtagtgtgaagtaaagataacaaaaggacgtcaaaattaatcaatgtatgtcaatgagatctttaaacagaaggagcatagctttgttccctcccccttccctctggaataaaaacggtgcaaggaaaattagtcaacccgtcaaaattataatctctcaatcaagatatacttagatcttggtaactgtctgaaagtgtaaatacaggaccaccttgattatactgtttgattggttcaagagccgttcggattacaaaaaatgctgactgatcattagaatataatagttgagtatatataccaatttacaaaggctgaaagcatgctgtcaagggtctctgcctcctggatttcccatttctattgaattaaaacaatgcaaaaacgggacaaaacacagagctattaatcgaaggacccatttttgtaagtagggacatactttcaagttgtttggttgaatttttcgtgctttgcgtttttgcagtgtttcaattgttgtaaagaagagaagtactccatttaatgagacctaaagattgacattacatgctcaatatgctcattgtcgagaagtaatttcacaagttttaaagaaattaggactgacggtaaataaaagtacgtctctcatttgatatcacacccaaaattcgttttaacggttacgttaatatttagaatacagtaagttacttatgttcttggctcaaatctgccctgattttcagaatgccttattttttctctatgtctggaaaatcattgacatttcctctgttttagagaaataattttcttgtttgtaataattaagctgtgaataagtaactcgttcctacaatctgatttttctagattggagacaattgtgttgtggatccaactgcagaagaggaaacatgcagtgtggcaagcatcgttgttgccgttttggattcaggctctctcactgcagtcattaaaataggagaaggcagtgttcatgaacaaacactaattgagactatcaaagtaagataaaggtccagatacctctcattgtatttacccattgatgatgtaattatgtctcattttccagcagtctactgctcaatacttcataattttgtattgtagtaaaatttcaatttgtgatatgagtgagaattggtacaatctattttttctcttagatgtaaaaatagttatttcttaagcagatccttggttacaagttacttcaacatgcttcaaattcaggtccacaagtttttgcctcaaggccaacactgccaaagtaaagtagaacattgtatcaaccctcagacgttgccaaatatcctaaggaagtaaggattttctagaaaatttggagcaaaattccttctaattatttagagaattttattagcaacctcaggtatcaaaatctttcgaggtgaaatgttcataacttctctcaaaactaattattttgtcagaggaaatctgacaaagtaagaatgttcatccagtgttatatttagtaaagcaaaatatgactgggtgccactatccgtttatcaaaacgaattcacagaacacattaaaaataacagcagctcttagaatgagcctgcaaactcatctaagatattttgactccagtggcgtggcgtgaatcacgatttatcgattgttatgccatttaaacctacggaaaaggatcgataaacagggtgttcgcagcgaacaccttaataatcgattttttaccataggtttaatggcagaacactcgatacatcgcaattcacgccacgccactgtttgactcgctgaggtataagtttttatcatttctcttttaacttttgtttcagactgctcagaaaatcggcgttgaactgaactcaagtctgatgacagcattaaatcaagaagaaagtctagggccaaaaagacagagattcgggtttttaaaatgatttaaaactccttcatttaaaataaataaaggtaatttaggtgaggaattttacagatatcagccaaatccaaattgactagaatcaaactaattatatgcgacattgcctaagtaaattcctctttttattatcttaacgacagaaaactgggctattcaactccatgaaactttttatcacttatcatgagaaacagtaagtcgtgctgtctgatgaggttatctagatcaaaacgattagctttgacttgaatactgtgaatattccatgatagaaaattagaaatattttttgaaggattattgatgatccctttcttccttctcttttcctatttccttactacctttgctggttcctgtacttaatgcttatttttcttcagaacttcagagtgccctgcttttttaccaacttccggtacaacttctgagtctgaacgattctctgagggatttggagaccacaatttaaaaaaattaacttctaaagcaagagtgggcaaggaaggatcttcgcctaagttagtgtttaacggctttcttggttttgggatgggggcttttgcagagttttgcaaggctaaggactccggctgatcattgcagacgttgttgtcattattggtccctattgtttcaaaagctccaacctctattaggttgtcagctatgttacttctatgggaaattacatcatttcactttctgcgggttttcctttcctgaggaaagttggtatattaggtttagagtagaaccttacattccttcatgtccaccaactcagactttaggttgtttgcaggttttctaattttagtttgtcttatttcgggtttttttcattgaatctttatctagtcgatgatgtttttgtgggttggcagctgtcttttcgcctgagtcagggtgggatggttcattgttggctgctggtttcttcaacaagaagcaagggaagtatctctttgtgatactgtctccttgtaagatgaaaatgtatcagtttgataaaatacaacagaaactgatgcatgtgaaagaaatttatcagaatattttatcaattataacaaaggggaaagctaacaaatgcactacgtaggttgcaagtgtctctgtcctttctgacagccttgcaatttaaattattttcatcatcttactctataatagtcagttattattgttttgagacattctgcaacttaggctagtaatgtccctacagttaatttatgaaaatgagtacaaagacaaacaatttagttaagatctaaaattataggagtaatgtgtcttgcatagtgcctgaggcgcgaagcactttaggagattagaccttgaagcgtttaaaggacgtagccctctagtgtcaattaattgagaatgaaaaatgtgttatatccatttctgattacctttttatttcttattatgtttcagtcattatctgaatcatctgaaggatttacctcacctacaatgccatgtcataggaggcagcagaaacttcattccagcttgacctgtgtttagcacttattttgatacttttcaagactcacactgaattgtatttattgctgtctcctgtaatgaggcagcacaatagccatttacaatactggctttgattgtttttttcaaaacccagactcatttttcactttgaaggataatatttttttaaaatattgatataccatagatttcacttccttgctcttgtacctgatgcacgtcaagcgatcagtgtaatttatatttattgctgattgataagaccaaatccaaaaaaaaaaacatgatcaacattttaatagcttgaatcacgttttaaagggcact

SEQ ID NO: 19 - DNA, 32564 bp, Bemisia tabaci
  source 1..32564: mol_type = genomic DNA
tattttttccgctatgtcctccctcgatgatatgtcctacattatccgtcttgctgagccagaaaaagactctaagtgtaatctgaatttcaaggaatgtttgtcgatgaagaatcatttccatatgaagtgttcagttacagtgagaaatcgctgcgttgaaagtttttcgtcggtttgccggtaaccctcacttctattttatcagtgaacttattgcttaaagtagtttttttaagtctatttatctttcataggttatactcctcgaaagttctgtaattctcgactctgcccacctatctcagtgctactatcagtggcctattaagttttcgttttggtttcaattcagcgacctcctatttgtgagataccttatcagtgaaccataccttggtatgttttgatttctctccctgtatctttcatcttcactatcagaggagttattcacagtatgtaagtaggcagtaggaaatctatacagtccacacctcccaactgcataaccttgtaaggtgataagtttcttttgcacagatgttcattggagaagatatcttaccgctaaaatttgctcccagctaagtgcatcgtcagttgctgtacgcagaatttgtgaattcagttctaacaatgtatgtgtaccacctatcattgttgattcttgtaagctttgccttcctgcaattccacgcacaaattttttcaccatgtaagcctttgatcattctgactactgaggtatttgagattgggagatatcagtacgactaacatttttcattctgggagtgactaaatcttctttagcggcaacaatgttgggaatgcacatgcatttacttgatgtatcgttagttcaaaactgactccatgtgatcctaatttacttgctctgtggcgaagttacatgatcatgggtccgtctccttccaaataggtatattttacaggcctctaacctggtgacgaataagttagggaagatgcaattttttcctttcggagttcctagatttctttagccatcatcagctggtggttttaagagtatttgtgctatatggtgagcttcttcagtccataagtacatcgtaaaaggacgtacgaacaacccacatgaacaccatgtgtcttctcggatttgacctttatttagttacctcttacaataattactcatgctattacaatgctcattgacattctagataatctcatgatatttatatctttcattcagtattactgttagtttgtacctttgtcagctctataccgattaatgttggttctcatcagaaataccatgttctcattcgcagagataagaaattgagcttcttagtcaactcgctgacagtgcatcacaaagcggttaattttactttaaattttggccaattactcaaatttgtagaacagaagtaggtatcaatctcagataacgctcagtcagcttttgcgcttaatttactttggtttttcttcctgcagtttgaacatcaccagttagcctcagtcccagtgtccattactgatgaagaatgattgagctagtatagtcaaagctttgctcagtgaaaatggaaactgatacatcttggacaaaaggagattcatcagtcagtctaattcgtaaacctgcttacctgtcttacatacagtcccttttatatttgtgccgttttggagcacgggtcttccatcgtcagctcctcacatgagtaagtatgtgcatatatatattgtaattattgaataagaattttccaatgaagaagggaatgggatagtgatggttagaaatagctttatcggtatctgccgtacgagtatgatagatagtagttgtggtacataggtaaaatatggcagtactggtaattttttaaactcagtaattgagatgcattgtgctgaacattaagaagcaacttttgtgagatcacaagctgctcaactcggtttgttcaaccatgaagtttttttttttttttttttttttttttttttaatattaacaagcagtaggtaatatcttgttttttctgcacaggcatcatggaaatggctaatacaagctcccattgggatgacaccctctcgaatatgtcatcatgctcttcgtcactggaggaatcgacaacctcctcaacatatacgtcgacctcagacgaaggcgaggactatggtgtcaaaatggaagagtgcgatttggaaggagtccgtcttcttcttccacaggagctgtgcgaagacccagcaatattcaaggagatgtttaatgctgggttgtggaagtcgttaagtgaagaaaacaagaggcatttattggtgagtatatccaaaacatgcttgcacttagtctttgacctaatttatttttattttaaggttaaacagttctcgggaaaccaaatgagcagttgagacaattgtggctattggactgttgaaagtaaactctaaattcagtctgtttttggagtctctataaaatgaaaaatgttcgtttaaaaaaaaaaactttttttgataagcccaaagtggataaattgaaactacctcttaaaatacacttaatgttgaaaaggtgtcaaaaggtttctaaacattggaaagcgtcataataatgccatcgaatccattgtttaaagttttattaatttttcaaagtaatgctgctttgtctcaaagcataaacatttttaagttgtcattcttgcttattaagtaatttttagatgagcaatagatgctagagtaaagcataaacatttttaagttgtcattcttgcttattaagtaatttttagatgagcaatagatgctagagtaaagcactcggattactagcacttggattactaaattatctggatgagaaatattcacgagttgcattattaatttgtgtcattttattatcagaactttttcccatcgttcccgcaaaatgacatgcaagaaaaatcaaaaaccctgcaaaaactcttaagcggtgaagccttccagtttggtgtcaacccgttaacggacttccatgaaaaactaagggccgggaatttcagtcctgatatcgccagagttcgagctttgctcaaacgggcacagtacaaggactacaagtaagcttactcgattgttatctagacttaatcttaaagtcattcacaagtatcttgcaaattgaataagttttttttttccttttttttgatcaattaaagtggtgattattattgattaaatactgaccttaatattgaccagagatatcaggaaagagcttcatttgataagtaattaaacccctaaaaaacgttttattaatatttatttggtgaagtgcatctctctttccattacataaaaaagctgagttttgaaacaaaatgaaaaatatcaggatccatgcttaacaatgttattcctttcggtaaatatgcatctgtcttaattttatggtgatttttaaattcttcttgccttttgtttcagacaaagtcagagacgctactactttcaactaatgaaaaatattttactgtctcgacatcggttactctctgcggcagccagtttgcccccaggtgccccccttccacggttgcagccggtcggcccagcctcctcctcttcaacttcctctcctatataccaaaaggtccgccacaggtatttcaaggagctggaatcaattaaacaagaaataggtgaatctagtcaaagttcagaagacgaaagttttccaggtaattttaatatgcagtgaaatcaaatacaaattttgaccgtaaaccaaaccaaaccaacaaaccaagagatctctaaatgcagtttcatccgacctacactaaattgcccctatactctgactccagcttcacttaggagctgaatcaacgttccccttgggtcttctctttttcaaaacattgtttcaattgtaaagctactttctgtacctttgttttcaaaaatgaaccaataatcggtagaaatggttaattcaatctcattttttattacaagcactgattttattagagaggcacggagtagttggcttgagatattatctcatcagttcaattttctagtgtggcaagtttttttttttttttattgttttttagaaagaaatttatgccaagtttcaacaggtcagcttttgttactaagtttctaatcatttattatcattcttttttcttgcagagggacctcctccgaagttgaataagaagcaaaaacggcaattactccaacttgaacaatgtcttagtccagacatgaaccctgtgacatcaacactggtgcctaaatcaacatcttttgacctcattcgttccgtcaactcctcttgtaatccctttgaggtcactgaagattcttaccgagaaatgcttcttgctcacaaacggaagaaaatgaatggcgttgtcaagacaaaagtaagaattgattcatttgaattgcattgagcaagcataattcagacatacagtaaatgcaagattgttggtcacgttggaaaaggcaggagcaattaggaaagccgaaactttttttgtttaaattttggcacaatcgctcgaaaaaaagtgcaaacatgatcgcgttttgctggcagatctcgcactgtcacttagcgagaaaaggagatgcatggccatacagctttaactttaagtatattttagtatattaaactgaaatgaattgttcgtaattcattctagcccaaagcaaaaacataaattaaatcaagcaatagcaaaccaaaatattcgcaaacaaaaaatgcattgttttttgtgtggcaacagcctaagaacatccccttactcctctttacccctcctcattacacctttatatctttctgcattatcctcgtctgcagcctgattgttggaaattttttttgtcgagacgacaaagatgacataggataaaaggcggggcccgattggtcggctatgtcttatcgctgctttgtcgtgcctatgtcggattgaactcacgacaagctaatggcacctcttaagtttccgatagtatgtcgtccattccacctgacaaaggcacgacaaagccgaccaatcatgctccgccttttaacctatgtcatctctgtcgtcccgacaaacaaaaattttcaacgatcaggctgctggtggagagctcactcattcattggatttaaatacgtagtgttaaaaagagccttcctttctctttcgcacatacctcacaccttttagcacatctatgactaaagtgtcaaaccacggccttcattgcaatgtttcaacattttccctcctattttattatttcctagaaatagaagcaaactctccagcctgaaatttatacagaatttttgctaacagagaaaaaaaatccagaaagttttcaagaaaaaacgttgactagtttttcaaggaataaataaagtatgactgaaattccttcaacgtcgcagagatatgtaccctgttttgcacctagctatcaatttattttttctgtgtgtgattcatgtttgcttttaggcaattttttaagggactctcacacttcagcaattgagaagtattttttgtgggagggggcgaggggaggggtgttttttctctattgtgttgtgaactttgcagttcaattcaaaactatttttattcgttggaaagtgataaaaattagaaaatccaacttaatcttactcaattttaatttacattgtttttttttttctttcaggtacctaatcgttcccagttaaagcggccaagtagtatagacctccatgccaaaggcggcgttgttgtaaataaaaaacaaaacgttagaagtagtgaacctaggcctcagaagagggcacacaaatcaaagtcatcactgatgcctgtaaatccaaaaattagctcattagtaagtttcatctttcttcacagtgttcatcaaattcgtctagttttacaatatagagtttaatcttttcatctcaggaaagagcatggtgagttttgagttagtgaaataggtcaaacattttaactatatgcaagcataaaattaagaatttaagagattttgaaaccatcatatctaattttatggataagcagaaatgaagtttaatagagaatacttagtgtgaaggacacagttactagcacgaaacaacaacaaatcaccaaaaaaataagttaataaatgatttaagcgtagctgggtcacgcaattcactgaaatgatcattgcataggagaatcattacatagtggaagaatgggtaaagattaaaaaattctaacaatgctccccaatcaagccaaaccctactcgcatcaatttttaatgttgcgtcatttattttttattaaaggtaaatccatcttgccaaagttgtgatgtagtttttaaatttatcccttcgtagggtccttaccaaacaaagatcttcaggctttatctcgtgtaagggagcatgttgacattcgtaactgaattctttgtaataattacatgaattttgggatttcaaacttattgagaccactaacgtctacgaaacaaaaagttagcggatttcatggatgatgtgccatgttctcttactgttcatgtttttcatttggctgtcttgtatgttctatcctaggatattgaaaattgtgaatcggaaggggatgaaaatgctcttccctctagtacgcttttagatattgaaggtgattcttcgtcttcatcttatctacctgggtaagtggtggaatttctcctatcaatatttcctccttataactccttgaataagtgaataaaaaaaaaattaaggatgcactattgttgcgtagattatgcacttttgactgaaacttaaaaattccttgtagcagggtgtcctagggtgatcaagaaaaaagtttcaatcagatttcgggtctttgtaaaaattctggaaggtacgtgactagaatagagctgataaaaattttgggtcgatctgataatttttggaatgtgcgcaccctccagcccccctcccgatttagactaaaatcgtgatatttcttattttcactttcagacaatgttaacacacctcgcgtgttgggaatatcggctcccagcagaaactctaaaagacagaataccaaagtaaatttttagaaaaatatggcactatctgattatttttaataaatgcccaccccccgagagcacaaaaaaatgccagttttgcaagtatttccacagttttaaatccatttgatcttaaatagtattttttgacggttattttttttacattgaaggaggatgcgcacctcctttaaataatgggatcctgcccaaattttaatgcatgcttcaaaaataaacagattcttgcaaaaatgtgtcttgcctacctttcataatttttaccgagaacccaaatccgggaccaaaaattttttctggattaccctgaacgtgtcaagtcccaagggaattttgtgaggtcaggaaaatgaaaggaatttcagggaattaaaggaaggctgcaattttaaaaaaatgtagaaacttgctaagtgggaaacaatcagcgctctgggaatctaactgagtctcaatttgattcagtactcaatgccatggaaaggaataattttcaatatgaaattgcgtttttagttgattgaattattaacacctggagaaaaatatttgaaatgttagttcattttgaaattcaaacgctttgtcaattaacatgaaattttttcatagtaagttagtaatgttgaaagtggtctcataagtagctccgtgtgtagagtttgcataggatgtcaagtaattgtttcgagagaatttttattattgaagaccaactatctgtaggttgacacttgtatataatatttataaaaaactttattatcagtattttccaacatacctagtcaggattttttgtgttaaaaaaatctggtagtctattgtgtcttccgcatggaaaaagtatggacgtaaaagaaatgtctgggaaagttattacagaacaagtttacttgctgtaatgacataatttttagtgtaaaatcaattgacgattcttaatctctcatgtcatgataggatgcccaagtccaaaagcaaaacaaagagttttaccgttgagtcgacctcaagggatactggtggcagagttaccgaatcaaatattcagcaaagttcaagtaagtatctcattacctacacattttttctttgtctattgatctcaactcgttacctatcataattttttacaaacaaccaaagacctcaatatatatcctttttaggtcgaatcatgaacttaatttgtctcggacagttcactgaacctggacaattttagcgagatgctgcattcttgattaacattttatgtaactcaatataatctgtgaaacccttttaggtttaaaaatccaagccatataattgtaagcagaagaatatttattatcagaattaggtggaacttatgagaaacctacttattagaattattctttctctaaaagcatggtagaaagaaaacagacacacaagtagaaacgagtccaggaacatgaaatagactgtatttgagtctaataatcaagaaagtatttaactgtacggtcataactcatacattcttgttttgcagcaattttgcctgtaccatttctttttgtacggtatccaaatgtactaattttaaaacaaatttctgtttcaatatttattgcacctgttccaggattacctgttggtccaccaccgatgtatcccaatcttggaagtatcaacatgatggacttgcctgttgacatcgatgagagtagtcaaatcgatgttgaagatatcaagtaagttctgttaatttgtgtggtaagaaaaaaattagtctgtcaatcgttttatttttagccaatgttgactccagacaaaagaaacatctcatttcagcagtaatattcaatgatttacaaatttacccttggttaggaagtttccgcattggaatcattttacaagaattaaagtgtagtccaattttattgaagtaacattttaaaaaaatgtgaattgtggtgtaaagtgttggaaacttcatgtcaaagtcaatgaatgtttaaggcagcagtcattcagtaaacatttatgatgagttttcaagctttttcacggatttattaaaggcctgaacctacatctgtgcaaaatccaatgtgaatcacttttgaatgttcccaaaaagcttatgctattctcaataacaatcatgccgagcagatctaatagaacctttcttttccagacctcttcctgagcttctgaagaagactcacccgtgttacttctccttaattcgtgatatattttgctcaacgtgggatcatagactcgggttgttacctctacgagaacaacttcagcaatggtcagaaagttccacatctctcctgaacagttggtattcactggccaaatggacagagttgctgccctcagccctggctttcttaactggggaatcaactggtaagactgctgcagtgataatgtaagatgcctcttacataatctgaataatgaacggttttcatacttaaacaaggactagtctaaatgaatacattagacaccgtcttatcttgaaaagtgcttaactctgagaaaaaaatcatttaagaaaatgggaaaatctgaagtcagcaagaaagtttcagtgaatggggaacgttttggggcgtaatattcgtagttcctaaagagagcacaaaatatatgtataacttcagttcttaaaaaagcacaatataaatgtctttaatccttagagttggtctcttttcaaacaaaacaaaaaatttgtgcgtatcttttcaatataaaatgattaagaaaataaataaaagatgcgtaaaggccccaaaacaaattctctaccctgaaagggaatttttattttgccttaagttgggcagtttttaaagcaagacattcctagaatgtaatgaatagtgaactcgtatcagaaagaagaaaacatggaggtatcgaagaaattttgtagaaacactgattcagtctgaaatgttcaattaggtcttttaatagactaatcaaatcaccttttgattgaccaatcgaattgcctttccagagtcttttcatattgtcagtccatggatggatcatatccatcatttttgggatagacacttgttgcagcaattttagcgtaagaacttactgtgatgttaggttgagttagtgatgtagttaggagaatgtatcagtgaaatgtatatttatgcgtaggtgaatgtttcatgatattcatttattatcttaaaacctataaatacgttcaaaagccgtgaacaaaaaaacaaatgccatcaagaacagaaatatacagggtaggagactaatcgctttattaaatagagtcctttgggatcaaaagatcaccaaagagaagaaaacaaggatatacaacacgattgtcaagagtatagtaacctaggggtgtgaggtatggccaatgaaacagcggacccgggaggttttagaggcaataagatgcctctggcgtagatccgctggccatcgtgcatgacattttgacaaaacaattcatttgttatggtcgtgtccagagaatggcaggagaccaagtagccaatttttattggtatttttttgtaagttttttatagtatggtaataaaaataccataccataccgaaaaaaataatcattgattttttattctctcttctccagattgtttaccggatgagtttgtgccatacgtggaatacaaacctgcgtgtgatgcctaccagtggatcggtgccggtcgtgactccgatgctcgtcttctatccttgtatcacttttggatggaaaggcgggagaaatcctcggcacaatcaaataacctggacgtggaaaatgtcaaagaagtgaaaagagagccctcgcccctacctcctcccgcacgatgtcaaacatcatgggttgtcacaccagccactcctgaagagcgggaatcctttagagagcaggtaaattttcttctgcttcttcttcttcttcttcttcttcttcctcttctaccttctgactagggctgtgaccctgtttgtctagcctctaaaatagtatataaatatgacaaattaaataagatggcgatgagagaggattaattctccggggatgaaaggcagctctgtgcccatctcttgagtggtcgtccgggttgcctttggctatgaggtcgtcctaccatacatatcttggcaagcctttccccgtccatcctctcaacatattccaacctcattttctggcgcatcttggtccatttggcaatatcttgaatttggcactcttcgcggattgactcgttggtctgcttgtctcggagcgtaaagcctgcttttttcctcaggactttcattcctacggtccgaaactgttgtttagtgcgcttcgtgtctgcccgggtctccgcagcgtaagtcagcacaggtcttacaatcgttttaaaaactctaactttgctctctttagccatgcactcattcctccagaccatttcatttaggcatctggctattcaggctattctagttgccttgattgcctgacttcgcacctcggtccctaaatccttcacactcgttattaaagcgcccaagtacttaaactgcattacttgttcaactgcggtaccatccactactaacttacatcgtattttcttcaatgattattatgtagagtaattattatcattatatctgctccattatttttaactttcattttattaaagtattttgagaggtaatttcaatagagggaaaaccaaaatcacggatgaataaggctctcaaattttaaaaatgcttcaaaagtggattgtttcaagttgttataggctcttttaagctgccaaagtaatgaaaaattatgtggcggtttaatcctagttgttatcatacagccattctagtgactgtgtgattctgatagtaataataattgtgtaccacacgcaagaatgtaaattaatttcaaaattgcaaaatttcaatgcgcagattttatttttattgggaatttgtttgacgtgtctgattgaaaattccactaatttttccttgaattgcctgccaataaaactagcaagatgttggacataaattgcacagtcatgttcatgtgtaaaaaatgtttcagtcaattttgaaaccctgggatggagttacgttccttctcttgggagacgacaatttactcaggtattatcaatctagttttattacctatgcgcacaatttccaacattttaatgaaaatgctcttgaccgaagttctttctcttttgattttttaggaaagaaggcgctttgaacaacctcaccgagcattcacttacaggatgcatgggtatgaggccattgtcggtcctgtgagggggatgtacaatgccgctgcaggtggtaaatcacccagagggcattcgctattagttcatgaacggccgaattatgttaccattttaactttaggtaagatgggtatcagcgttgtaacaagacaataccaaatattagcatttgaggttaaagaagtttttctacagagagcaaactgaaattcctcattgagttcctgatgttgcttttatgctttttaacgaatccataaaacttgtatttcacttcgttgtgaacagatcaaaactcaagtcttttttctgtaaaacaaggatcccacttacaatgcgctttcttcaaatgtgttgcaccaactttgggatttaagaaatcggcattttaggtgtgtgcaacatcaaacttaatttgggtagcatgtatatcaggcctgttacattgtatcttctaagatattttctcagatgattgtttgggttagcggactaaattccaagaaactgctctaaaccttatacaaatgctttattggaattcattaagatacattcaaagtcactgtatgctatgtaaaatctctttcagtcaagtaaaataaaataaaatcgaggagtacccacctatttacggttagcagaacgctctgggtgatccctcagttaaatataatttcttcttacctgaatattttaatcatattgaacacttgttatattttgtttgctgagcatcgtttctcttgatagccgttcgatgttgtataaccacgcttatttactcaaatttcttaattttctaaagtgcttacactgtttctgcccttagttcgtgatgctgtggccaggcttcctaatggccagggaacacgggcagatatctgcacactgttaagggattcacagtacttgaacacgcaagtcaaagatactgatgttcagaatgttgtgagtggtgctttggacaggctccatgcggagtccgactcaagtgttaagtacgattctacgaggaaaaactggatttatctacatcgagctcgatcagaagcagactttggtgagtcatgatggtttactatgtttttgttgattgtaatgtttgttagtctgttagatttctccttgctgagagtcaattgataattttactgttctatatcaggagaaggtgtttattttaatgatcaggtgcctgatatctcagttgtgcatcttaaaaattgtatcttactgcttccctttttaatgtgttgcgtttgcatagtctgaatcttctgatgataaaataatgctaaacaagacaacaacaaaataattgctatcccataatggtctacaaactgtgtattaacggcggagcttgtgtctggcttaagttattgtcaatggttgaaaccaggatggcatgaaagaataacagcaacgtatcaaccactatttccctctcttgtgctaaattttaacaagttcggtgaagaaattctccggtgtactaattttctgtatctgattctagaattggttcacaaagaaatgcaaggcatggccaaaacaaagggtccaaagaaaatgcaaagggtgaaaaaagattcagcagcgaaagaagcaggagaaggcagttcaaccacaaccgttttggtatgtaatcagaatattagtgcatgagtagtaaattttttgttacaaaaattaataatttggataattggctcctttaaatggcggtaactttgcttgctatcgcgaccactcgcgcaaacctcgaagtgctttacgtaacctctccaaggacagaaggagagaatcaggaggctgcattgtgttgaagatgggaccgattatactcaaaacctgtcgacagttactgacctgatttgcagcaactaatgtctcaccgaacagtatatctcattgagggaaaattgtgctcaaatgagctttttctctgtatacagagaattgctgcctcatacagaaattttacgctcattggcaaaatcaccaactttctttccaaactttttgtctaaatttctttaaaaaaatattgaaacagcaaaaggctgatttgggttagaaatcgacacataaatgagtgaaataacttcctttgcgaattgtagtaatccttggacagaatatgctatgtgtattagtgagataaacaaaagacaaaggagcagcctgaaacatatggaacaaggcaaaaaactgacgtcggaacaaatgcaggtcttttgatgtcttacattcctgcgacatgaatatcaaatgctaaaagaaaaatgaattaaaagtaaagtaagaaaaatcctactataaaatatgtaagtatcctaaaatatattttcccattctagttttaatttatttttctcttagcagttaacaaggatcttgttaaacattgaaacaatttgcatttgtttccgtgtccgattttagccttgtctctgcaatttctccctttgtttttcaaaagtatatcagtggtttcttatggcattactttacattttctgacttcatttttggatcttggtgccaatctctccatcaaaagatgacaaacaaagggtctttccgtcttgaaactttatgccttatgactcgtcaatatctttttttaatttttcagagttctaaaaaagcggactcagtcgccgatattccttcaactcctgcgtcaccaagtatgacaaaaccgaagactatcaaaactttagtgccaaatcaaaatgcggtaaggttataccgttttttatttttcataccaataatggtctaatctataactgttctggtgcaaatgtgaatcttagagatgattcaagacagttctaaggatcataaaaagttttatttcatacttgctttttctgaatgttatttatctcttttctttttaacgtttttagttctgcctttttgtattgaagctctatcattccatattttttttttttttattattattattattattttatttttcatcactgcttgtaaccagtctaatcaaaaattgtataatcattacaggtggccattgtagtattttttcgtaatctcctagacaaaggaacgtatcttgatcgtgctgaagtagtatttcttactggcattttattttttcataggagaaccgtcacatgaagttgcctgaaatttccagtgattattcccaatagagggagaaaagactcaaaaaattttcagaccaagtgcgatcgttctttcataaaaaaatgaaattttcgtagaaatactggaacagcacaagcgagatccgttgactgtgtagaattcacaagatattaattttaaatctttatcaagttcattgattttgtccgtctggcattgatttaagtttcaaaaagtccaaaagctgtggcataaattattattgatccatttgtcgtctcctgcttataaaagctaagaaaattggattgaatgtactctgtatcataattcttactgccgtcttacgggagagagctgtaattgcatttctgtgtgagccacgattagcacaagcttttttgtgtctcgaggctcatctcagaatgcatttgcaccttacacgtaacacgacagcatatccggacggtttcttttggctgtaatattcacagttctttaaaaaaaattgattcttatgcaactgttgcaccgttcccgagagagcagtggagaaaagtatcacaagaattcagtcaaaatctctaaaacaattttgaattggactctgaacatgtatcaattttttcgcaccaaaatggtgcgacaacattgccattgtgtgcaaagtttttgctgtaaaataggccgactatcatttggtaactctggtacaaaatatattccctggaaattgcacagttctttgatccttatttaattttggtgaccttgttcaaatacagattgctgccgctgctgctgctgctgcgtcagtcgccacagcagagccaacagtgccaagcatacctgcacagtcgcggccagttacggatcctaaaccagtccttgtgaagagaagttctgtgccaaagaaaccaaagctctcgcaaggagccatcatgtcaaaactgctcaaggaaaaatccttaaatcctgtgcctaagccactcagtaaagctaagctcaaagctctggaagcagcagctaaaatggaaacgaaaaatttcaatgctgatgataaatctgtggtcactgaagatgtgaaaccagtgaaaaaagtcaaaagcacggtaaattttattttttattgtatgtactagtggtattctcatcaacacattgcctgccacatcggtcatatcaatcagtattgaagggttctgcaagtgtcagatcggttgtttcaaccaggatgtgattgctctctttgtgtgaagccagaggtcttcacagccgagttccacagaacctttaattttttttttttccaaggaggtcattactatgcagaaaaaaaagcaagtaacaccgatactgaaagaaacattctgttttgtagacattttaaggttataattcaggtttttttatctattttcctcaaataattaaaattaatcagtaatttaagtaaccattactctctaatcaattaaattttaaatcctatttactgtggaggggttcttcaataaaaatgtaaccaaacaaaaaaactggtggaagacttcaccactacgtatttcatttttgcccatagcattttcgattttatgattacatatcacttcctctgtctgtaatatatgtagttcaggtatctttctattattttgtgcatttgacaaaaatgttaattttctctgtcagttctacgaaaccattgaaaaatcagaggtaaccaaaagctgaaaaaaagtgagtcccgcttgcagagctcattacagataagttgacctcattctaatcctcagttggtgcactatccatcttaaatacatctgagctgtttctgcatcaatattccaaaattcgaagtcttaggttttgttatacctgtaaagactgcttcaacaccgatctgcagctagcgaaaggaagttgataaaaaatatgtgaaaatgtgaatttaattcaacaatataatgggcctgttgcaaacttttgctagagcagaattaagagttgttttctatagataatgcctcaaaaatcacgaagagcgcatcggcaaagtctgaaatgcactcataaattcacaatctgcgtaagaaatccgcgtttttttgagcttccagcttcaaaaacgatactactgcacaggtgaacattttgttagaggagtcatttcattgtcggcaatattcatcatggccgacacttgtgcagttcctggcgtaattcgttgaaaatatgaacgtaaacacgccgattgttatttggtttaatcctgttcaggtgttatctcgtcccatcacttgtgttttggcggattggcgtcggccatgatgagtattgcggccaatggaatgactcctctaacaaaatgttcacctgtgccatagtatcgtttttgaagcgggacgctaaaaaaactgcaaatttcttacgcagattgtgaagtcatgagtgcatttcagactttgcccatgggctcatcgtgatttttgaggcattatctataagaaacaactcttagaattgctattgcaaaagtttgcaacaggcccattgtgtacttggcagtagattgactgatattttaatgttgatagtatcacaatacagaaatacagaaatcggcaacgtggagaaaatgagaggggaatacttatctgaaacaggctcctcccaatcattccttgattcactcctttagtatttcatagcttttgaatgacagttcaatcaatttttacttttttaatttactaacttgtatgcttataaattgttttcagcctaataaaccaaactcaacaccgacttctgattcgatgacaattgttgcgaacattgtgaataagaagcaagagggtagtgggaacactgtattaaaagtaacaaaccaaggtgctggaggtcgtacggtggtgggtcagacgtatgtaaccccacagcagttgatgctcattaaacaagcgcatctactaaataaacaacaacagcaagcaacgagtgatgctcagaaacagccgcaaatgattgtcatcaatcaacaacaaaaggtaatgttccctacataacatacacaatcacagctataatctgcctcaacatactctaattgaagtgcaagttctataaccctcgtttattgtatagagattaagtattattataatgaagatttgtactacagtggaatcttaagtagtcaataggtaaaggataagaaaagccattagctgtgatcagtttattcagttaacacattgccgaagcttttcgaccccactcggtcatcttcaggcattgtttgtttcatgcttgtatatagttctgctccctgaagatgaccaagtggggtcgaaaagctttggcaatgtgttaactgaataaactgatcacagctaatggctattcttctcctttacctattcattattcttagctgttaaccgcacgatgatgtttaattatcttaagtcgtcggattttcaataagttggaagtttggttttattttattttatttttaccaatgttcaaattgccctcagggctaatcttacgctttatcccctagactccttacacccaacgtcaggtgacctttgtctgaagccatcaaattcaggtcacatggtgaaaatcgaacccaggacctcctgatcttagagccagcgctacaaccactacaccacaggaagtcaaataagttagaaattcgaataagttggattttctctccaggcccaatactttatccatataaacaattcacctggtctcaggataggtccgaatcttggatttcgtccaaccgtttttctgacggtatgtgacatcatgacccgagatgtatgactatccattttttccatcagttttcttggctttgtttctgtcgattactatggaaggagcctgtactaatttgggttagggaggggaatatataagtgataaacaggatgatatctgaagaatgcgggtatacatatgcttttgaaatatttggatgaataggtccaaattaggagggtaagacttaactatccttttgagacctcatttaagtctggagttagttgattttcaccaaactaaactgcttacaagccaaaaaatgaaatcaattttgtaaatttttcttgcaggtgctagcagatcagttgtcgctgaagcatcaaaaacagctacagcaattgttattgaagcagcaacagcagcagaaacagctgcaacaacaacagcaacaacaacagcaacagttacagcaacagcaacaagaacagccgcaaattcaacaacagcagcagcagcagcagcaagggcaacagcagccgcatcaagaacaacagcaaaccaagcaaccgcaacaagcaaaacaacaaccaaaacagcaggttcagcaacaactgaaactgcaacaacagcaacaacaaccaaaacagcagaaacaaccacagctacaggtagtccaacaggctcagcagccggaaactcaggaggcatctgaggcaaagccagcacctgaaccaaaaccacaaacgcaaacacagcaaatcaacttatcgtcactacagccagctcagatacagcagttactgctagcaaagcagcagttattggagcaacaacagaagcagggaattatcacaacaggtaagccttgtcttgagttttttaacgtattacctctctgatctgaaaaagacaaagtaatcgactcgtgaaggatttttttttgtttttggtttcaactttaaggctgttgcacaattttttttttaaaaaattcatctttagaaagtacttacaagaaaaatgagaatacaggcattttcctcttttttcattgagttcagtaacagctgagaaatagacactcaaaatcataaaaaatgcactcaaaacatgtatatgtatttacatgatcaatttttttgcatagcgcatgcaaaacatttattgtgctcctaaaaaataatggttggctattgaaaattgggctttccgacctacgttgcatctaatattttaggggaaggcagaacactgcagaaaatacggagaactgcagcctttttaagttatgacagtcaaaaatttttaattatgattgcgtggattttgtcctctttgtccctgtgttggcttaggaagaattcgatgaaatcacatggaatttctacttttaaaaatgctctcgatttcggtctcaacttcaaattttttttttgtttgaaagctaacttgtatttttaatgaacttttcccccttgtttttagaacccctgtacagaaccccctaagtttagaagaaagaaatattgccctaaaaatgacccatcgcaagagtttaaatcagacaaatccccaaaaattatcggtaagtttatttttgtatgaatgggtgcgattaatcaaaaaatttgtgaatccatagctggtggcaaacaaatgatagtcctgaagcaagggcaacagctaatcacagctgatggcaagacaatccaacagcagcagccaatgcagcaaatgataatcgtgaaaggttcatcaccggataaaacgcaaacaacaacaacaatcagtcagcagcaactgcagcaattactcctcaaacaacaacagcagcagcagcaacaacagcaacagcagagcgagggtaaaacatcaataacaaccactgtcagccaggcgcagttgcagcaacttctagcaaaggtacacctagactttaataagacaagaaaaaaatactgtgaactcaagctacctcttactttcaaaatgaagtaattagaatgtccacggaaaaccaaaaataagaatctgtctttgagatagatctagaaacaccttaaaagtacagatttttttgttaaattctgcagaaaatttggaaattttcagagttttttttttttttttaggaaaaacgtgatagcaagcacagaattgggccgaagaggcgtcaatagacacgctgagcaatgaaaaaaatgagctaaatagattaaatattagagttttttcttttcttttcttttttgctttgatgctttctatgttgatttgtattaattttgttgtttgtgtacagcagcagttcatggtactcaaacagcaagggaaacaagggcaagggcagataaaattagtcccatcaggcacaacggtgtctggtcaacctcaaattaagctgacgcagacaatatccacagctcagttgcagaaaatgcagcctaggataatctcaacgcagaaacctctgacacctggtaagctctttgtatttcaattcctgtggtaatcattctaaataattgctgattcatgctatggttcatgtgaaaatgatgtaatccagccaactatcaacataacaatgtaacaggagaaactgtaagaaatgaaaataaaaccaaaactaaacaataaaatgcctccatttaagcctacagtaaataatcgattcttgtcccagcaactggtccctccaagaattgatacttttccataggtttgggtttaggaacaacaatattgacaatttgctggatcagccaatgattcaaggcaaattttgacttagtaacatacgaatatacgaatataatgtaatctcaatcgcaaacgaatatcaaggaattgtaacaaaacgtgcttactgtcaaatcaagagactgtagagaaaaaggccgcaatggaatagcaaaatatttgcgtcaagaatttcccacttaaatgtgatcagcgatcattttaatgcagttgttaaatctagttgaaaaaaccgaaacaaaaagaattgacaattctttcactactttaatataaaaattattctaatagaagggtatccaatcctagtttttaaattgttacatacatttttcttcgtaaaatttcttaaaattctcacctatttaaatgttatcaatgtgttgaagtgttatttaatgagtctctcaagaagacttagctgtattatggggagttcagataataatctgttcttttcttttgaccagtgtccacgactgtccaagccataagctcaacaagcagtcctctagcaagtggtacgaacatcatcaaaccagttcagtctgtcatgacgaaggttgtctccaacgctcaaacagaatcggtcgtaacagtgggaaatctcctggcgaaccaaaagcagcagactgtgatatcttccggtaagtttaatattaggttaccagtttagcgacagtgtccgatactcttgtcgcaaaattttgttttgatgattgaatcttatagattcttttgaaatggcgaaatctatcaaagccaattattctctgtccaaaattaagagagaaattaaggggcttggaagaccagtaaaattagtgacgtttttgaaaaaaattgagatattgatgattttaagtagaagcagtcttaaaatatattctaaaaaaatcccctattaaaatcgaaattttaagcctcaaaaagtgatttttaactttctttctaccacaaggctccatgtgattttgaaacttaaactatgtgtttctcgaaaaagcaaaaattgcacttatcccccttgtaaggcttttgtcgattttcttttgaaaaaaattgtgaacgaaagaatccattagagcaatggataatggtttctcccgccttaattttattacaaaggtgcgaggtagctattaatgtcaatgtttgcatcagagaacaaagaatctaatatggaagaaactaatagcatcatgttcctcacaaagcaatttcctgtacagtatttaaccaagaaactcgatagttagatgaatgtcaaattatgacattcaatgaaaaaacattgcatgtgtagcaaacttcagtcaggacaaataaaagagttgtttttcaaagaaggtggcccagaagttacgataagcgcattctcatattcttagttttatccctacctcacaatttgctgaagaaagttgcatgtcattcacctggcagcttcattaagcaagtttttttgggaagctgaaattttgggaaaagatgctgcttggtatactctttaattacaacagaaatcatgtaaatgtagaatagaaaaaggggaggtcctttttgcatcaatctctttctccggaattgaagccaatgtcttagaagggttaaaggggctacaaacttttttggcttcgcctgtctatgtgagtatgatttaagcacagtagatcattctcatttaatttgtgtcaatctggtttataattttttcctcctcttttcttaatcccattattgctctaattatgtctctacggaattttttaattttgcagatggaagtatacgtgtagcagacaaaccaagtataggttctcatcagtatacagttgtgtcgatgggagagggtcagtcaagggtcattcaatcaactcagttggttcaggtaagttgtcattgttgtagattcatgagtcaaaagaaaattatctgtcataacaccgtaaaaattagtcagctgaaaaaaatagcgcacaatatttgcatcttatctgtaaaatgaagttgaggatcatgcagcctccatttggcatgccttaggcgggcattaaaggcatatcctcattaacccattgacttaaaccgacggctcccaaccgcccgcgcggcgctgggccagacctgaagagacggctcagagccgtccgtcgattgtttgcgttatttcgccgattctccggtagattgcgttctcatcaacgcttatatgagtagtgtggccaccctatgacttattgtgtacagtaatttcttgttttgtctcggtattttcacatgactgtgcgtttgaacatggaataacctcaaaattttctgattttcgctgattttgcgacttgcgcgactttgacagctataaaccacaataaaaaaccatcgtgttcaaagtgttcgccattttctcaaacattgtattgtgaatgcttattgtgtcaattttcatccttagagaaagaatttctggattattttgaagtgttcaaagttattgatttttgccaaattaaatcgtaattcctcgcccggcagggtcaaattaaatcataagtcaatgggttaagtatttaaacaagagttgtcccacagagcaataaagaaagaattaaagaaagataattatttaatgctaccgaaagaagaataatcatactgagttaagattaatttcagtctaccaattttgaaaatttgatttcaatatttcactcatgttatttcaggcaagtacaaatctgacaaatgcacggaacattgcgacgaaaacagcaaatttgcgggttctgcaaagtccgacaagtatcaaccttgctcagctcgctgggaaacctgtcattctttcccagaaaactcaaggcatccaaggccaggtcagtaattagcccaactactttctcaaaacctaaaagtaagtttactgctgatgtgttaagcggagttaattccatgtaacatccatgccaacagctcttttcagggatgcagaaagtttcaagcctgccgttgaaggaaaaaggacccaagaaattggacttttccgatgctgaaagtttgttaaagagggttgccacagtctaaaaataccgggaaaactaggaaatgtcagcgaattttaaaaagtcagagaaaacttggaaatgtcagggaaaattatgaaagcgttcaggaaaaattggtaattcacctttctttcctttcaagaatgggtttgacgtctggaacaacaaattttgcatgaaaactttctgggaattttactcaaatgcgtcaggaaaatcagaaaaatgtcagggaatttcattttctaaattttgtggcaaccctggcaaaatgaaaatatcaggaatatctaacagtcttccagtttttccttgtggccaggagcatcacaaggtctggaaggttctatcctttgtttttgctattagcccacatggctcatctctaatttcctttgttcctgtgtcaacagaacatggtcatagctagcagtagcgcaaatacaagtggacagcaaactattctgctaccacaaagtattaagcagccaagcggtagtaacacagtgacagttttgcagtccggaggtgtgccacaacaaatattgttgccagcaggttttcaaggaggtaccctaaatatcaaagctcttcaaggtctcaaagtgattcctgtggcccagtctacccaagtacaaaaaggtaaagagttttcttccatttttcatttatcccgaaatctgttgaaggtaataaatttccaacaaactgacatttgatcttgatgttaactgacatcaaaccaatatcagaaaatcaacaactaactaaaagttgttgtttcctaacttcagggtgtaaaatctttttaacctggctttagaattttttcgagtgttgatcaaagtttccctgggtgttttccaggtaggattagctgcgtatgtaaacgattttaggcaatgtgtcaataagtttcccaccatgcttgtgatcctagaaagcaactgttttttgttgaagaatggagtaggtggttatctcctagcagtgaactgtaggaatggcaaggagaacctgaaatgatacaatgcaaatcttaaaagatcttatttaattctcgtatcggctgcttttaagtataactgaacctacgctgtttgatttttaattcatatctgattgaaaatttgtgtaagaagtgtaaaactttgcactaagatacttcaaggtttgagaattaaagaaaagagtcatctataaaaatggcgattgtcaacacctgtcgctgtcttaaataaggcctcatatcgatggttaaagtgcaaaactattgtggtgtatcaaaatttttgcttttattttatttcttgaagagaaataagccaactctatggctagaaatttatacagattattttgctaacaaagagaggaaaaaaaatcaagaaagttgttaagaaattatgttgactagctttctaaagaaacaataaaagtatgacaggaagtatgaaatgttgcaaaggtaggcatgtgaatcttttttctaaactttcaatacagataaacttcttacgtacttcttttgttatgaacattacgtcttacgcacctgtagctacatttttgtaaaaagttactgtttgtgaagttttgaagaagaaagaaaaaacattctgttctaaacttagttctgatttctttaccaggtcaacgccaaatgttcgctcgaataattagtccagacagcacgaccaaaatcatcccggagcagacgaaccttaacaactcccaagttgctgaacagagtgagtgagagatgcctctccatgtttcactctaatttgtaattttgatggatctgcgtatctatggtcagcatgcatggtcaaagaaagtcattagccatcatggccgtatcctagtactgctttctcaattagctccaaaaggatgctgttttcactctattttgtggtgtagattctaatcaagcttgtgttgcatactgaaatgctctgcacaagtcaaacatcctctatcagcaaatttgagtattttctttttttttttttttttttgcttcttgcgttaacttggttacaatataaataatcaccttttttgtacttaaattaggtgatcatgccgtagtataacacttgaaatgccttgtacattctcagttcatacatattaatcagagtgatttatattgttgcctagttgactctgtccactaaactgttttaccctagcaaggatcatttaagatcagtattctcttagagtttgtgcggttaaaattatgagccgatactctgaaaggggaaatgtacttagttacaacaggctgcttgctatatttggaatactagatcgttttgagactttttattataattgaaaaatgttttggcagagaaaaagcttttctctaatacaacattattaataattcaagcatccaacatttgcatgtgtgccccttttctctcatgctgtaaatgcgggctgctaaatataagctacacagattgagagtttacttatttgagatttttgcagaagagacatctcttaagtatcctcaaaatatgtgtttccaaagtcagaagtttactttctaggcatctaggttgtgccataaatagatcaacaaaacttgacgaatttttagaaacgaaaaggaacttaaatatttttgattgtgaaatctcttttagggattcaaaagaatgttttctttgcatcatttatagcaaaaatttaaaaaatttctgaccaattatacacgcctcttgttaaggctttatcagtaatttttttctttttgaactgtatcaacatttttttcacatatcatcagaggaactgaaaaactgtgaccttcctagttatttctgtcttattttatttaacgtaaaagaaaccttattgtccttaattgttttaaacttaatgtttaaattctgcattatttttcttttcccagtttcttttagaaatgaaataagagaggaaatttggaaacatagcaatttaagcacttcgtttttttgtctcatcattgatgtgtattctcttctcaggtaactagcaggaaaaaatgaaatacgcaacgaatactgaggggcgttacataatttcaacagatattagatagcaccactgccaaatcctccaaaatatcagttgctttccatgctacacagtggcatattcgtgtaaacattgtaatataactctgactcaggggtaagttttaataaatgaaaggtggcaatattgtaacagagaacatgtacctaatttgccattttagttgtgctggtgaattgtattcactttctgacctctcattactgctcctaaaagaaatggtctgtgaccataagatgaagtagaaatgcaaggacagttgaaatagtataactatttgtttgaactatgggaaaatgaatattttaaactttctgtagtgaattgtacaatgggcctgttgcatgcaagcgatacagccgcgcgaatagactttttagaggttaaatgacacgaaaattacgatggtcacattaaaaaagtctgaaatacactccttactgcgcaatttgcgttgttaggaacgcgctttttcaaatttcccgcgtctgggggcagttttctaatcaccagaaacgagcaaacggcgggctcggtgatttccggaagatgccgagtcgttgttgttgttgttgttattttttccttaagtttgtttacaaacccaacgtgatctcctatagtggtccatgtacgctttatgcggtaaccaaatcgatcaacttttaaatatccaacgcaattcttctacatttaatttcacgatgtcacgagctccgatttttaggttatgttgtcagttttagttgaccggaaatagccgcgagttgccgttaattgtttccgttagaaaactgcccccagacgcggaaaatttgaaaaagcgcgttcctaaaaacacaaattgcgcagtaaggagtgtatttcagacttttttaatgtgaccatcgtaattttcgtgtcatttaacgtctaaaaagtctattcgcacggctgtatctcttgcatgcaacaggcccattctcttaattcaaatgttgaatgtttgccgctccagccatgtacatctccttgtactgccatgccacggaaaaacgcttttagagttgccagagagcgctcagacattgccaaatttcctttgataaaatacgaatttttagcaaaatctgagaatatttttcctccaatttttcacaaagttttattctctttcagatttaaattaattgtaaactgcaaaagaaaatactgacagctttcttttaaaatggaaattttactggaggaaatttggcaactctcgattgttcatacggcgtttttcctcagcacagcagtgtaaaaggaactaggtatgttggtaagaatgagatgaagacaattataatgtgatattttgagggttttcctctccaagtgcaatgaatgaaatgtgtgtataatttatttgttcgaaggttgtttgtttcgtactcttgaatttgtgtgatttccttttgtttccctcttctttttccttccccgactagtgaagttactttcgataaaattaatgttaaaggaagactgaatttttaatattcatcaaatcttaaatctttcatgtaaagtggttgtttctcttgtatttatattttcaaatgctgtcggtatcatgtaagatgagcatctcagtcgtgttaaaagagcctagagaagtttttctctatgcgttgtgagtgtcctcttaatatgttgaaaaaattctgccctaagaccgaagcacattttcttgatagtgctgaaagagttatactgaaactggctaaaaaattacctactttaaagcgccaatttcataatatctttagaaagtaacaaaaatgaagaaaacattttcaaataatttacattaaggagcataagtcaggttcatattgtcaaaatgtggatgatacaaatgaaaaagaattataaatactcctatcaatgagaaattggtctgttgcacgcaagagatacagcaaagtcaatacagatgctttacaaatgaaatagcatgaaaatcgcgttagagttatcagaaaagtctgatactctttcttcagcgtacaatctgtgtagtttgtaacatacatacataaagtcgcttttatagcgccgcctcgtgttctgcgacgcccaatcgccattgccccctgtcctcccagatatcatcaggcaattggcaccttctgatctcctcctccaccccttgtcgccaacctttcacaggacgtccacgccgtcgccttccaggaggaacccaatcgaagacctgcttgggcaaccgatcacctgccatccttcgcacatgtccataccagaccaactgcttggacctgatatcgtgcacgatgtccttctccacacccattatcttgcgcaccttctcattgcggatatgctatcttctcgatatcccagcagaccttcgccaaaagtccatctcagttgccctaagcatgcagttgcatgtagtttgtaacatgctttttcaaatttactgcagctgcgggcagttcttctcagtggccggtaggccagcagtcaagtttgcttgcagagatatcaagaatacctcacctatgcaaacaaacaatctcacaaactgttaaaaacttccctgatgtaagatttcaattgattcaaagcttttgtttgtgcaaaacgaaaaaagggaacgaacagacactgaaaaacaattataatcatactctagcaaaagtttgcgaaattgtttgtttattcaggtcggatcttcatattatgtgtccatcttgatttttgtgcgatttgacccataaatatatttacttgactacatatatctcttgcatgcaatggactcattgaaagcgatcaaacagactgcttcatcattaataggggttcttttgctgtgtgagggaggcaaatgaccaaaagccgtatttttgtaattaaaatgaaatttttttatcataatgattgaaatgcaaagtgattcacaggctcaacaaattttgcaagttttgatactaagttctagcttgcatagccatttgtgtataattttgttcagaccttcctgaatgcgtgtaaaaaaatcctctgaaatctttcatgcctttggaaaggattgcattttacatgtaggaaattttccaactctagcatgaaattttcttctcacacgtttcattagtgcatcctctactgtgtaaagcctaaaatgtaaaaattctagattggtatacggacagccaaagtgtgaaaccatgtatctaggtttgcgacattgcagacttcctgtcattctttattttctcttttgaaaaccagggaacacaatttctttaagacttccgtaatttttcctctctgtaagtaagaaggatattctgtattttcaagctctgaagttggcttgtctctctaaacaaaaaataaaataggagtgaaaattttgaaacaccgcaatggatatgcgtggttgcacactctggccattcgtggcattctgtaaaattgtttctttcttagcctcaagcactcttataaagaaaacaatctacgctcatacaaaccacttgcgaagcaatgtcatttttgcaaatgttcttttttaatgaatactcgaagtattagatttttatttcaaaacttctgtccctgttttctgtaagtccatgttctagcttatttatttcatgaatattgggatcattgtatctccaaaaaatttctacttatcgaattaggagagtttgaaactcattttgtatgattttgcatcagcagtcactctttgcaattagttaaaattaaagtttgtatatttgtaaaaataaaataatgatgtcaataggaagtagcctttgtgtaaaagatatctgtttttatcgtaaaatatgagattgtacatattttggagccatgaggaaacttccaagaaaattacccttcctcttacctctcaatttttaaagatgttttttgcgatacccctgcaaggtaatgaattaatgtatagctaattctattaactttaagatccctctcagataataagattgactcttaaattgttatttttattcaaaagtcaaattgaaacataataaaaaatcaatcaagaaaattttgtacagaatgtgatatgagtttctcattgaaacaaaattttaattgtgaataaaaaattgtttttgttttacga

SEQ ID NO: 20 - DNA, 14938 bp, Bemisia tabaci
  source 1..14938: mol_type = genomic DNA
ctcacattgctcacaaacatgaggcaagctagtagataaaagcaatttttgtattcattaattgttcatctcgctttgaaatctttggatagttggctcctttttttgcacgtaagtttctactacacggggtattctccaaaatcaatttttaatgcctattttcttctccagttacttgcacttcgaaactacttcattaggttatgaacctgagtaacattctaataagtacacttgattatttactatgaattcttggtttaatcaattttgttttctcatctgtgggctcaggaagtcttaaattagtattgcggtgacgataaattaagacctgaacgtccaacataaacatctcggtgaagagctgttccatgctgcgctccgccgcaacgtgaggttgagttcatgccataagagtcagaattgtttatgactgggatggaagtcctcctgtcgtaagttttgaattggtaatgaatgaaagtatctcgatggtatatcttctgatgcattccggaagtgtcgtaacccgtccggtgtgcactcgagttgatggagtcaaagtgccttgaaggtacctaagtcgccccaaggttcatctgatacatcagtttttgcaggttgtttttgccacaaagctcagtttcatagtacagtgatacaaagcaagaaatttaaatctctaggattcattgtgaaaagttagtctaagcacaaggggtgaaaaatattaacgaacataggcatatattagagtcaacatagtttagtcttggatttcatctttctattatgtatgatattgtagaacacctgagtacttgtcagagtcttaaaaatcaagtttctagaatctgtaactaagttaagaggaatgccacagatggcacataatggtattatagtatatgacacacaatttgatttcaaatggcatttgtaatctttaaaatgaggtcaagttggtaagtgaaatgaaatcttctttgattttaaataactttctattgccttgaaataatgcatgtgacacccctgcctaattatattctttttttcacagtaaggacgtgaagtaaagaaatcagaacgccacaccatgagtgatacgttgacccaaagggaactaggcctattgatcatcagattctctctgatcacagttgtgtcctttgtcgcattcaaatggatgttacacaaaatagatccaacaaagaagcagaaggaggaagccaagaagaaggtgtatatcttatgttttcatctttgaaatgtttcaggactacttaaaattaatatgcaaactgattgcggtaggcacatgagtcgtttagatagaaagttggtggtgtagccggtgtgcattacaatttagcatataaatggccatctcaatgcagagggaaaaagctcatttgaacacaattttcccttaaagagatatcctgctaaaaaaaatatggatgctgcatttgagacaaatggaccaactaaagtgaccggccccccggggagaaaccctcttacttgaaaaaggagagttctggaggcacttacctcctctcaaaaatttaaataattgaatttttaagtaagtcttctcaactcaatttctaactttttgaataactgcaattgtgatgccaaagtacccaacttttcaatttcctgagtcactaaagttacgtacaatttcagatgaaattttgcaatgatatatcaaagaaaaaaaattaagcaatcgaaaaaagtggtattgaaagaaggtagaaacctcactcaagttgttccgagatagattgacaaatttctgtggtacctcaaaaattttagagccagtttgaccctggtaagccgtggctctaggacagaagttctgtttgtcctccctttgggcggccttgaaaccttctgctatctttgtccagcacgcatcaaattctgaagtgtaggcggtttcttgcaggcagtgctgctgctcctattttgtaaaaagcactcgaaagaagcacccaaagatctgtatatagtccgcatcaattttaccaaattatctgcatacactctgccgaagtggtaaaaagtctataaacttatccaaaccaatcaagataaaatacaccaataatctgcattttcccattatatccacatctgaattttaacaagatccataatgtagtctgcaaacatctacaaaactgaacatgcaagcctttaagccaggaaaatataacaaaatcacaataaatctctgcaaaatgtgcatgaccttaaagtttctacaaaaagtttgaattttctgcaaaaaatctgcaaatagtcggcactctcccaagttccctgtattagtctgtaaattcttcaattctgcgcatttttagaatcctctaagttgctgtctgccgttttcacttgttaatgccaggttacaacctatcattttattctttctgacgaacctcaaaatttcaatctctctgaggtctcaattttccacaaagttttgtttcccttccattttcaaaattttctgcctctcaactactgatcaccattttgagtgaccttaaattattttttttttttagatagcttctttatctttatttcctttcttctttttttctcaggctcttgcaaatctcaaacggctgggtatgaaaacagatactgacgtaagtttaatttgttttttcatattacatcttctcttttctgtgctgaaggaagaaaaaatgggctaagaggtatatgtcgctccgattagaatcgggcccaaaggggaatcatttcatacctctagttttgttagagaagttttaaaatgtcagattttttgatccagcccctcttgggaggaggggggtgtcaaagaaaaattaagttttgggcataacttttgaacggttgcaggtattgagtttaacttgtttctaaatgaaggagcataatagaatctttttatcgagtataagaaattgacaattggttgatttttgacaaagttatggcttgttgaatattttgaagaattttaatttaagatttttcaatgtgaggggttgcagaaaatgtaacatttgtgtatggaaaagaaagtccttgtttttctctttgaaataagctaaagcacttgtcaggagaacgatcagttgctgagttataatttttcaaagttgctgcgacaggctctacaaatagccctgtagcgaaataaattgtgccatttctcaggaactttcgaaaacatttccttgctgttattttccttgttttttctcatactcttatttccttttaactttcagttaaatgatcatgaaatgatggtagctgccaatttggttggacctaatgacattcctgtttcttgggatgatgttgctggtttagataatatcattgaagaactaaaatatagtgttatttatcctatcaaattaatgagagcaagaccggaatctcgactcactcgacctccaaaaggcaagttttgatatcagtggcctggcgtgtattgcggtgtatcgattcatctgccatttaaccccatagaaaaggatcgatgaacagggtgtttgcaacgaacaccccaataatcaattctttaccattgtctcaaatgggaaaatatcgatagttgaacattcaagcctcgccactgtttgatatggctctcataatttttctgcttttttttttctttttctcaaaccgatccaagacttctgctctgtatgatgactactgaacgtcatgcgaaaggtcaattcttttctttacacaactttctcttttcaaatcattacacatcttgaagccaagagaacaccgtccattttgctctctttgcttcaagatgcctcaatgcagtgcttcaatgaaaatgtagatcataaataaaatacttgacaaggaatcatgattcttaattgttagctataataatttcatttttttgccttattcattatcaagcaggatgacaattgtcaagaaagtcattgaaaaccctggaaagtcaggaaattccgtcaaagaaccttgactttctattctccgaccaaattatttaataattttctaccgcttttacaccattgacaagaattaaaacctctgcccttgcatcttcgaattttttcaatttcacgaggcttcacatggaacattttttgtaaagagcatggttttgaaaaattatccaagaaaaactattgaaagtcattgaagagttaggacattttctgctctataaccttgaaaagtttaggaaaggacagtaaattttgaaattgaaaaaaatttgtcacttcgataactttctgtattttcgcaaattgaattgcttttggtgaggaatcgaagaatggaagcaaattttgtttcgaaaaagatacctatgtcttctacatttcaacttcatattttagtctattggaattcaaagcaaactccaaagctattaaacccttttcttttaaaattttttacaggagttcttttgcatgggcctcctggttgtggaaaaactttgttagcaaaagcaacggctcgtgaagctggcacaaactttattaacctggaagtttcccttctgactgacaagtggtatggagaaagtcaaaaaattgcagcagcagtatttactcttgcaacaaaactacagccttgtatcatattcattgatgaaatcggtaagtttctgtaaacctttttacttgctttactgggagagaagaactatactcagggtttccagcagtctgggaaagcttatgagtcaaggaattgtgcggcggtgcagaaagtgctcagttggcggatcacaagaaaaattattaacttctctcctgaaatgaagcccttgttacacttgctgtaaaagtttatgaaaatccttaattgaaccccaagagtcttgaaaaatccttgcattttaagttgaaagcccttaaaaagtctgtaaacattcatggatgttgattcgccagcagaattttgggtctttttaaggcctaacatctatttatattatgcactggtcagcaaactaggtagctgtgtattttggtttgaaacatgaacaatattcctgctattgcttccgttgtaagtactcaaatgctcaaaagtttggaaaggtccttgcagttcatgttttaagtcactggaaaacttggctaaagtacttgttgagctctaggaagtccttaatttccatttcgttttgggtgtgttggcctgcggtgtagaagtcgtagcgttggccctgtcattagaacgttttcggttcgattcttggtcaggcacccctaacctgagtatagtggtttcaacaatgattgtttggggctgtttgttaagtaaggacaaatgacgatggggctctagttacaggattacccacttgagggtatttgcagttaaaaagaagcgttaagaagaaattatgaagagaaaaagcaaataaacctcagcatttcttattcttgccactcaagttgaattcaatgttcttttcttaatttttagattcgtttctgaggagcagaacgacccaagatcatgaggcaactgcaatgatgaaggctcagttcatgtcattctgggatggtctactcacggatcccaactgcactgtaattgtaatgggtgccacgaaccgagcttcggatattgatgctgcaattttacgccgtatgccaactgtatttttcattgattaccctgtaagtagcagggttgattcttgaactgtcgaagattatttttggtgcctgttggcactatataagtattacaatttttgcttttgttcacaatggagaatttgcaggtgtctgaaatttgatgaatttcgtgcctaagtataaaccactgagtgaattgaacacaaggatacccttggtttatgaattgaacaattattataggaaaaaagacaaaatgatctattctgctgaaatacattttatgtgtttaaatggagaaaagtgtaggtttatgtggggaaatgctgccagatgacatcaccaggctgtgcattttctaacttttaaatctgtttttatactttttttttctattccagaaaaaaagtataggatactgcagcatcagctcttcgagcactctcagatgaagtgattaaaattttgcaaccaaatcctatattctcaattattccttaatttaggcgtttatatctttcgggcactcaaaactggatgtagttatgtgaaagggaactaagtgtagaatttccaattctaaattttttatggacttgaatcctccattatgtaagcttctcagtgatttataaaatgttaaaaaatccctgaaagctgttctggacgtgagacaccatgcttccttttttgcagaaggtaaaaaacatgtcaaggaatgaactgcatgtgcattgctaagacctgtttcgaaacaatagaacaaatgctggaatatgcattaggcaagggatggctcaatgaatacccttgtaagtggtagaggtcaggagagagcaatgagcatcttcgaaaaaattaagaggagaccggtttaagaacaccttcttctgtttatccctgtaagattgttgatctttttgacgagaccatctgtcaacacctatttattgtactgtgttttctgctgctcagttttagtgcacttcagttgaatttttcttgaaggtgtggcaataaacaaaaattactgtgggctctgcgaacgcagtacattctattgaagcaataaaatgtcactgacctaccaaacctaccaggttcagtaaattgaacccattaaagcaaaatccagtcaaaggatcgatcaatctgaattaattacgcagaatgacttagtttagcatgttacttaatggtattttgaaaatctatccataaattagcaaatagtgactaagtcaggtgagcagaaaatggaagacctgcgaaaagaataagggtgaccaggaaatccacctgtgttttcttttttctttttgaaaatcgttgtaatccaaatttttgcccaaaaaaaattgcattctgtaatttgtgatttttttgtaatttttcgcaatattatagttcctttttcaaaagaaatttatcaaatccgacttgtaagaataactaaaatcatggttttttacatcatcatatttaaaatcattgaagaagttgttgattattactttccttttcaacactcttttgaattctcactactcatttcaatatatttttatcattaacttctttcattatttttttgttaaattgattgtcaattctctgcttaatctgtcaaacttgttctttctttttcttacagtcaacaacacaaaggcagaaagtactaggccttacattgaaaggcgagcaactagcttctgacgttagtttagatgtattggcaacaaaaactgatggtttttcgtgctcagatttgtatgaattgtgccgtaaagcagtgagcactaggaatcagaaagctttccaatcttatgtcaagtgagtgattctatcgtaattttctcttcgttcttctctgtacttttcctcactgaaaaaggctttttctgaccggagggtagattttctgacctcatcattgttcaggaattcaacttatttgcacaagctaacttttaatctgtattatcaccttttctccaatatttgttgaacattggtgatttcgaagtagaggtgttgtcagataagttcccgtatgtttactttagatttgcaggcacagacaacgaatttacatctctgcacaaagcgtcgttagctactatccacctcaaaaacatccgtctcatgattgtatcatagaaaaaccacttatcagttatgattcgcgacttttatgtggttgtgatttctgcgtggctaaaaattaaagtattacaaagtttgaaagtattaaaaaacctatccaagcttgtgttctcccttctgcgagaatcagatgttttcatttggatggtagtgacgtgaaaacgcctgcaaatcgaaagtaaggaaatgtcaatttatctgacgacacctctaatgaatcactatattttgtgctcaagctctcctttttatttgaaaaataaattcaccaaaccgattttttttagaaatccttatcccaattttattattattttcctatcagtcataaaagttctcttaactcaatttttaacatgtaaatattttctctcctttctgtttcaggagccaagaaaacggtggcatttttgattcgaggaatcaaagcaaagaagactcttctaaagacttatcctctagtcagtcgtcaaaatcaccaagtagtaaaagtgaacgtccttccggagacgcagaatttgtcaacataagaataagtccactttgtatggaagattttgagaagtcattggttaaaatgaaagctgcaagaagtatattccagtcttaagaaaaaggttacttaaccaagaagcattttaggtttgtgcagagtcaaagtccaaaagtgcagttcattttagtgtttttgaaatgaaaggtcagcctttgatatgatctactaccatggaatggtaaagaggttataacagcgcttatttaggacatgtagatatctatattcttcgagcacaaggaggaccccatttctgcacttgtgaaattcgaacaaatttttttgtaattgtggcagccgctatggaatcccttgacggtttttgacagttattagttcctgttaggcttttttgggtatttgttgttcttttgcgaaaaaaaaggacacctttggatagcatcaagcaaaaattatctatctatgaggagttgtttaaagaaagaatttctctgttttctgagtggcaaggagacttgtgtatatcaaagaaaacacccacaattgatagaaatagacaatgatactatttgaggctagtgtatgtagatgaagcttcacatcacttgaagtaaacttcggaagatggtggaaagtggtgaaatgcttaaacttgccctacggcagatcatagtttttattttctggaaaaagaaaaaaatcgcttgtagacctattttgtgccaagtgccacctataaaaagtgaattcaaccagagaaatgtaacttcaggcattcaaaatctcatgtcaagaagtttatttaggtcttgagtggtttcaaccagcctcgacttaacgccttattgtcgatatttcttttaactctttgaaagtctagtgctcatattccaatctaacatacatctggactaattgcaacttttttcaaaactctttgtagatagatcatgattgttcgatgatttgaatttaagaatttgtgtgtagcaagtatgaatctcctttattttttttcaatctgatgaattttctttaccactataatcaatgaattgatgactttcagccattacctttcttaagattacttcaagtcaaggccaggaggttcatttttggaaatcctggagttttttttttttttttttttcatttctttaatttttttttactgaataaactctgcttaattttgaagtaacattgctctgtttggtgtggtgtcctctgcagacgtttcacacagatgtttgaccaacgagaagtgctggtttgggttccgcaggaagttgatgagagcttcatcctgttggttgggtggagatgctgtagattggttgggttgacttgaccactcctcctcaatttggtttactagggtaggacatttggggggctgtatgatcaactttctttcaccagaaacatcgccaattcctggcaggacatgatgctggattgtgctttctaggacagcggaaacactgttgcttgggttgtggagactgcagcttagatttatcatttgactgtcattcagaccaatgattaattggtctcgaagagctctatctcgatgagtatcaaagtcacactttagagatatatttttcaattcagcgatgaaatcaggaagcttttcaccttgaatctgtttacatgagtgaaatttaaatgtgtcagcaatgtcggactgtaatgttctttgagatttataacacaatcactgaaggacgcgtctttaactgatttaggtgctagacggttttttaatatttgaaactgttctggagttaatggaccactgacaaggtacgaatttcagcgttctgatacatgtttcttaaccagaatttcacgtagagcacgatgcgcacaacgaaaattaccgaaatcaactccacacaacgatatttaatgattcttgatgcgtgaattcaaaccaccagctcatgaaaactcaatgctctacgtgattcacatcgcgcgctaaacgttatcatgacagtctttgcgatataaaaatctggcaacctcaatcttgacactttgcctcagctatagtaaattgcctatattttgaataacacatgctgggaaatgaacaatgcttgattaagaagcttgctgaaaccgttgtactgcgtgttttgactcacgtggagcgttgagtttctcgtgagcgggcagttcaaattcctcgtaaccaatgtgaaaaagaaatgttaatatcttcgtgaggagttggtttcagtaattttcgttgcgcgaatcgtgttctacgtgaaaatattgttaacgaacacgtatcagaatgcttaaattcctaccttgtctagtagtccattgtaaaattaagtgatcgactttttcttcctctgcaattttgcaaacgttgaagtaggattcttataggtctaggaaatcgacgatgttcccttgctgagaatcaaaggcacttaatttcaggttagacatggttgaagttggacttacaggaatgatacctaaaacatcatcaaaatcattggatgtggggactccaaatatctgtaggaggtcaagttctgaagaatcactcaaacttgaagcacgtttccttcttcttcgtcccattgttgaggttaggcacccttgcaccttgacacatcttgagaactacaaacggatgaattgatgaaaagacggaaatttttttgtttattagactaataatgtagttttgttatgtttatgatatattaactgtgtacgggtgttgattgttctttaacttaagacgaactcgtgacgaaaccgggttggggtatgacgagcactgacatgcgcgattgacgaaagaccactatgaacgactaaaactgaatatccttgttgccaatgttataacggactttccgctgaattgcgaagaaaggaagaagacatttcggacgatgaaaagacactttattctggtataagaacacaggacagcggagacaagcacagagcctcaaagacgatgacggagactgtccctacacaatggactcgtccaaacatggatggaaaaaaggcgggccgattggtccttctcaagaggtggagttgacatggcgcgaaatgtgaaagctatacaacagctgggtaaactgagacgtaggacttggatgacgtttaaggtgacccttacggtccgatgacttgaagttgtgctgaatatgcaagttgttgactggaagagcttgggacaaggccttgactttgttactaattatgtcctcctggatcactttcgccttagctagagcaaaggttaggttttctgttgccagaagtttgcgacggatggcatcgcttctgattccgatcaccaacctaccccatagttaatcgtctaggaatgggccgaaattacacttagacgttaagtcctgtagggcagtgataaattcttggactgtttcgtcgggcttcggagatctttggttgaattgatatcgagatgcttccaacaagttttccggctcataatgcgacttcaatacggctactagctccaggatagggagatcttgcggtgcttgtggcagacaattactctttcataactgatgagagcgcagccctatgtaagctaaaaacaaagctcttctatggttgttaggggggggggttgcccttgcgccgctggggcaggctcatccgcaatattgttaatgaaataaaactggtcgaacaggtcgacccattctgtgaatttctcagcagagggatcgaagtgttgcaggtactgaaatagagactgtacctagagctcgttgacattgttctcggcgccttcctgcatgattcaatacgtgcataagatttgcactgactaagacttggacttagacttgacttttgatggactacacacgcgaattcgactctttaaatcctcgtcgccatattaacatgtccccagacaagggaaaaaggacaacagagactctgttgaaacggaaggcttttattcaagaaaaagaacaaggcacgacccagattttcatgaagccagagagagcgggacgccggttgccatctttgacctcgcgttgatagatggacgtttggtagtggacaccacattttcaagagactatgaaaaaacaaagttccctttaacctagaccacgcgtacatccaagaccgaacattccacctgagcatcaatgatggtgatattttgttaaaaccttgaagttcctaatatgggtacgaaagttcatctacagttcttagacacgccaacaggtatacttcttccattcttacttgctccatatcaaggagaaaccattataaagaggcatcctttttccaaaggttccgatcggcttagtcggtgtaagaggttttgtgctgtgaatctatcagcatgtgatgctgatcgaataaaaccttgtgattattatcaattatctttctctttaatgtaatttgtgtatcttcctcatcaaagaaaatgatgaacagttaggcatactcttttttttttgtttttgtaaaatattgatctgtggaattttgatttttaaatgcacttaggtgaggagcagagatgcaccatgatgtatctattagaatttactgaacccaaaagtgacttttttgttaattgacgcagttacgtttctttgaagtatttctagagcagtggaaatcagaatgcaccgttgtaataattatgattttaaccctgtactgtttttcttctttgttctttgtgcagtttacttgtaggtgacaccaacccaaaaagtccatcggtagttcaagttagaaactagtttttattttagatctagaatagtctaaaatttgtatcaagtagaaagttccttatgataaacaaagtaacttttgtaacactggaactagtggaagtctcttgtaccattcccagcttgcaaatgttgaatcatagctgtggctagacataaactaaatattaagacaaatattttgctgcgaaatatctaaacaggaaatatctgagccaatgcacaaaacagaatgcaagtgttttgattagtttcttgattgtgaatgctgggagccagggaaaccataggaatcattctagctcatcgcagtgatggcaagaaaatgactcattgcggcacttacaaattgattttagagttgtctcagcgcagcttccacccacggtccagcaaaaataattttttgagttgttgtctcctgtaatatcttgttagtctaacagttaccccgtcgttttctccagggaaaattttttgcgaaattattggagttcctgtatgcagcagagattttcattagaatcgtcttctttcatgtgaagttttgtgagaaaaacggcagtgctgctggttttttctgaagtgattcccaagagccatagaaaaaaaccatagttgagatcatatcagtagagcaccactaccttatgcacgaatgcctctctgatccaatcaaatcctcagtgcagagatgaggttgaatacatttgcagaattgcgatcaggttgggtctctctatgtttcaatatggtcatttttacactgcagggatggttattctgctaaagttatcagttctgctcttgcacagaaattttaactagtcctagactatcttatgaggtggcgatgctcctccattactgcttcaacctcaggacctctttttgagcctgagggttgacactatcagtaacaccataagactgctccctaaactttatgaaggattgatggtcaaagtcggaactctcccatgcatgcaagaactccattccagaagtaagacttctgtcttcatctcaaaaattatcatacttagaataagttgatgaaaaaatgtttgtaatacctcggcttcatagtgcaaaaaccattaattgttcttcattgtaggaagtggtcaagaacaggaaactaatagttcctgtaggactaattacaggaccttcagaacttaaaagaggcacttacagagcaatgggagtgactttttctataacctgtatggcctattcttaaaatgtaaaggtcgtaggcaatgtgaaagtttggcagagaaaaataattcctaatagaattgattaatctccctcgcctaagaagaattgcattcaaagaaatgtttccaatggatggcttctttaatgattttgatccctaaattttgaaatcgcaccaagaaaaagccttcttccattggaacatggagactaaatttcaaactctcattttgcgtaaagctggagttattttctaagtatgttattgccaattcactcaagttgtgagtaatctttacacagaaaaaattaatgaaacttacctccagaatgatcttggtggttatattttcctcatgagctctaatatgatgctcgtaaattctgttttaatgtaagaaatttattcttattttctttttttaaatgcagggactgataatttaggtttatgcagtagtttgtaaaaattttagatgtatcgcaacaataaaattgtggttttcctttta

SEQ ID NO: 21 - DNA, 36476 bp, Bemisia tabaci
  source 1..36476: mol_type = genomic DNA
rbatatgaaaaaggtaggtaaaaatcaataggcattttagaagtaaataattgaggtaaatgtttccacaggcaaaaataacctgctccaaaatggctgcctaacatctctaaacagtttctgaggattcctcagttctatcccgctacggtatagagcagtatatgcatttacagactcatgaaaacgttctttgaatgccctcttttgagtgggtcgcaagtttttcctcttcctttcaaattatgtaccaaatcaatcaagctttttcaccacatgtatctttgtttcaatagtaatgattcataactttttcacttaaagctcttttccgtagcagggcagatgaaaattcgctgtgcttaaggagtacaccataagagcatttgattgttgccaaatttcccaggataacgtagtttatttttagaagttatcagaaatatttttttccgtcggaattggcagattcaccagattaaaatgcaaattttccagaaaattgcaaaagagaatattctgaaagttttccaagaaattcgtggtttttcagaaggaatggtgcaacatccaaacgctcctacagtgttccttcctagcatggcataaaagtgtttcaaacctggctctagattctacaatgaatctaaaaggcataatcacatccctgaaattagccctctgggggtcatgaagtcatgactaaattgttctatctttggtttggtggtttcggcgcattgaagcacttctaatgacgagcgatgtgaatgatggtttagacgtaagggtagtccggtgactgcttggcgtgcttgttcttttgcgggaagtaagagtctgatttgccgtgcttgatctctttcttgcccgatggcacgtggtgggctacgtcggcccggaatccgtgtttgtctgacgagtatttcacgattcggatgaatccgttcggctccaggaaactgttaacatacaccaaaaatgtattaggggtcacataaatcatttatgtactttcctactggctggttattgtaactgcgcagccgctaaaagacaagtgcagggactgtaaaaaatttctcaaaaaacatgtaaattttaattaaaaaactatcaataaatctgataaaatttacgaggaaggaaactttttttgggaagttttttacacaaaatttacgagaggtcaaatttaagtacaacgattgttgaaaaactcataaaaaataactcttaataataatacactggtttttaactttttttcgacgtaaatacgtttaaaaaaattaaagtccttgaggagttttcgaacactgtttttaggtacctacttgaattttgtctctcgtaaatttcacgtaaagaaatccccaaaaggatttccttcttcgtaaattttaactgtttctttaacagttttttttaaaaatgaatctctacagccattgctagtagggtacgatagtaccctgggtacatagctctatttatacaattcactttatcgcatttcgatgtctcgcctggtcagcatagtttccaataatcggcgtgctcaagagtctaaaagtgaaacacgaacttcgactattatgcctgcaagaaatgtccttaaagtccattcctctcaaaaaaattagttaccatcattgttgaaaaaaatgccgaactgaggtcttggatgagataatatcttttggttcattttgacaaaagacgcggttgcatggcactttcgattataatatcatagcatgatactgacacgcgatgaaagtagacgtcgcgctcggatttcgatgtcaacgcctggatgcaactattcgtgctccatggatgtccgggtggtatgcaaataattggaggcgttttttgtttcctggccaccgctgcgctacatgcaggagctaaaattatgatcgtctacagattgtgcgatggttccagcagcgatgtttcattttgtttacgcaggaagttattctgccgtgctaaggaataacatcgtatcaatattcagagcctatgttgccaattttttctgaaaatatggtcattatttagaatagttataaatggtctttcgtggcattctcaggcatattgaagcaaattacgaataatatgccctgtaaacttaaaaggaaaataatcaacagctttaaaaaaaccattgctttaacagaagatgcttggcgatgtctaaatgttcatacgccgtttttccttagcatggaagtattattattccacgggaaacagaggagcctttccccttccaatcattcactgtcaatgacatgattttgaaatttttgagggttcctgaatcacgtcgttggcacaaatacctggaagaaaataaggcttctctctttcccgttgaataaaaatacttccatgctaaggaaaagcaacgtatgtacattcagacgtcgccaagcttcttcagttaaaacaagggttttcttgaaagattttgattgttttccttgactgcctttgatttttaatcctccatgaaatattacttgaaatttgcttcagcacatctgagtatgccgaaaaagaacatccataattattctacaaaaagacgattttatcagaaaaaatgtggcaacctctaaaaattgaaacggcgcggcgtttcctcttagcttggcggaatcgcttccagtgaaaacagaatgaaacaccgctaatgtaacctttgcacaattcgtagatgatcatgattttagtttctgcagagccgtgagggcaatggaacgaaaaacgccttcaattttgtgcataccacccggacatccacggagcacgaatagttgtattcgagctaggcgttgacatcaaaatccaatcgcggcgtccaatttcaatgcgcatgtcagctaatactaaccgggactgagagttcgctttgctatccttccgctctttgtcagattgggccaaaaaatattctcgcattaccaagacctcagttttacatttattttaacaataatggtgactgattctttcaagaggaaggaaaatttaggacattttctacattcaggcttaatgatccggctgttttgtgagataaagtgaaaaatcagaacgacattgagcaaactcttgatcaattctcctcagttttttttatcagcatctgtcacatcttctttttcaacttattaacagcatttatttggattattcatacagagatattatgcgtagcactacgcagacaattgctgatgatggtgaatttgcacgtacaatttttattgcctcatctgagaatatttaatgagctaagttcgcagtatttttgataaattttttcggatgtgtgaaattgtaggaaaatatctttaaacgtgcaaaaatgcaccgcctagttatggtatttggcatttcccatttaaacccttaattaagcagattcggtcattttatcatatttccctcaatacttgttcaactcagaaaccataaggatatcctcgtgcagttctcatagcagtttcattttaaacatgaaatttaagaaactttagacacctgccaactcttattctgccgtgctaaggaaaaacgccgcatgaacaatcgaaagttgctaaattttctacgataaaatgttcatttttgaagaaatttatgcatatttttccttgaaacttttagatgtgttagattcatgtgcgaacaatattgttggaaaaatcggaagaaaaatattctcaacctccacggtaaatttgtactttatcaaaggaaatttggcgacgcctgaaggttcatacggcgtttttccttagtacggcagtattcacttgatgtccgcctcatcattcaatattttgagtttttttaatgttttttcttaaatttttttaaatgtttttttttaaaaaagaaaatggtgaaaaataagcatacctgtagtatccttcgacatcgtcaccacctccggcttctgctctttcttggtagttgtggtagtgcgggtcgtggactctgtatccgaattcgtatttgagatcgtgctcgtagtgcggctcgtggtgtggagcgtccacctcatgctgcaacatagttttttattgtttaaatttgcaaattaaattattaaataataaaacaacatctaattaaattattttatttaataactagattataacccccttttcatcagaatttccatagataacgctgattactatgtaagagaggaatatttacatcgaaagctctgtcattgcccaaaactagagcccaagtagcacaggtttcaatgaagtgcgaatacccaagttacacagattgcaataagttgcaattaggtacatagtaagaatattgcaattccactgagtgttatgtatgttgcctagctcctatttgaaggggccccatttattgagactcacgcgctataaaatttattgaaagcacaccgctcattgaaatttattgcgataaaattgaaataagttgcaatgtttcattgcagtgcatattgtctacatctttctgacacatgacactatgttgatcttcaaaattggcaattatagaccaaatgatacaaaaatataacgattccagggtaaacaaattttaatattattgcaataaatctcaattttatatcaacatttgtatcgccttgtgctatactaggaaagaatgtccaacctggtaaaaattggcgataagagctgcgtttcaaaataccatagggattcttatagccggctaaagaaggctacagaaaatcatatagctggctgtagaatgcggagaaaatcatacggccgggctatacggagcgataaaaaattatgcagccgggcgatagttcctatagccgggttttacactatatcgcctggctgttgctttttcgtcatcgattataaaaggctataagaaattgtgtagaaattcgtgtgctttggaactcattaagtttgatacggaaccaccttaatatttacaaaacacacgttatatttttcctttaatacatattttgtttttcatcaactaaaacgagaataatccatacaggatgtgtaaacatttcaaaatcatgagttgaataacgctgactctgccagattaaatattagagcctaacacaaagctgagcggcgacgcactggcgcctacaaacctaacagggatactatacgcattgtgcaacgcgtgaagtatccctgttaggtttgtaggcgccaatgcgcgtttcgagctggctgcccgcctgccgcaccgcagcgtgccacggcgcttgaagcatctattttacaccagaggtattgaacagtatcatacgaaactgaaggcgctctattatattaggaatggcaggcatccatcaaaagtacagagctttccgcgcaaaataaatcaagataccacggcccaaaaagaaagcagtggtccaaaaactcaccaagtcctagcatccgtaattagtgacgtttggcatacgctttatcgcctggctgtgagttgcttagtcgccttcggctataaaaggctataagaaattgtgtagccggctatagaagctattggaaatcttacagccggccgtaggtttatggtattttagaacacagattctactgccaatttttactagggcacttgaagagttatctttgattggctaccaactactattcttccataataactttccatagaacttgtaagtttttttaaatttttttaaacaaatcaaagaccagtaaaaagccatgcagattttaaccgagtgattatgagaatccaaacacagtggaggcgtcttttaagcaagccaatttcattgaagattccactcactcggttaatatggttgagtccatgcgaaataaaacgcacctctgaagtgcgatattagatctgcgatctctattttcgctctggaagtgaatgtaagaatcaaaatgaatgatctcactctaatattgcgtataaattcatttgagcacggactcattttatttgactcttttctattgcatttaatttctgtaattctgtacagcattttcataagttattttaaattcaattaaatgtgggagtgcgtccgtaatctatgaaacgtttgtgtggaattttctaaaataataccataataagtaaaaagcaaaaggtccgacatttacatagttgtctagacttcaatagtggtgtaacaaaaatcgaagtgcagcaaatcggaggcgcaataaaaagttctcaaaaactaaccaaacttgttcttcatcgtaacaaaattattgtttgagtttgtcataataacattttgaattctgtcttaaaaattaatatcaaaaacaactcaatgataagagattttaaaagattcacgtaagcaaggagaaggaaagttggttcttgcgcgatagtatatcaacacgtcacagagacttgaacgcaagagtagcaaaaaagagttcgatgaaagaaaataaaagaaagagcgcatgatcaaatatcaaagtctaatcctcctttgcaactgtatagtacaaattaacttatcaatctccaaaaatttttgtcaaccgatgggagggggtgggggggggggagctacactcctttcgctagcaaatgtgtcctcctaatgatattttaggtgtgcgcatatttaaaaattacaaaatattttttaagagtaaactgcatcatattttggataaatcactttgtcggtagtaggaagaataaaaatgaaaagcaaacacgtgagatgggtattaaatagacgttgctttgttcaatatttttacattgaatgcaataaacaattttttggacctagagacatccgaaaataaaataatttctgaaaatattatttatacaattctcatcgtgctctaattattgactgactgatctaatgagccgtaagagtcaataagatacaccgagaaaaaagtcccgtcataagaaaccgtaggtacggtgttgaatatcggccggaatgtccagttcatgcgtccactttctcggttctgggaatcgtactctcggtttttgcgaccaaacttttttgttagttctatttggtttagaaccgagagaactgttacatgaaccaaacgatacggccgatatggaacaccgtgaattcgtttcataaggccgaagtttttttctcagtgtagttgggatgatttttttttaaaaaaaaacttgacctcatcacacttgtactattcaaacatttatcgcacttttattcaatcaaatttacaaattttacgtcaaaaatgcagcacgggttgtcacgactgatcgaaaaccgcgagtggtaaaaatgtataaagaatggctcacaaaattaaacttgtaaattagacataggtggggggtaatttggctccatatcacttttttggatgttttggagtcacgagacaaagaggaaactaaccttatcggtcggatggtacccatagtaggacgcgggctcggccactttgatcaaacagaagatggagagcgtaacagccaaaaacacgagggagtcgaacatattcgcgacgaaaagtccacaaagtcgcgccaaaaccacaaactcaagcactccggaggactcgaactcgagaccttgaacttgaaaagcgttataagcggtgtgagggccaaagtcgagcttatatacccggcctcggcgcgcattttctccttgcttttgttggccgccggacaccagacccgttctaccgcgctgagttaaaaccgcataactccaactggaagctcgtgcatgtacgcgctttttgctcggcgcatacccgttccggcctcgcagccttgatatcgcttatttacatccacaatttcattttcgatcgagtcgtgcgccccccccctccccttcccttgtcccccgctcggcgggccgcaattaaaccgcgggaaagtgcaactttgtaagttgtaagtgcgcgcggtttcggaagcgcgagctggcttttgttttgcgcggtcgcgtttctcgtctctgcttatttgggcggcgcgggtaggaagcggtctttccacgtctttcgagactggatgctcgggtgggctcggatagagtacccttaaaggaaaaatatccacggccaaagtagaaaaccacgtatcttcattgcgatgtttcaaaatgtccgctcttattctattttttccttaagggataagctagaatagcctgaaatttaaacaaaatattctgccgacagaggcaaaaaatccaagaagttttcaagaaattacgtggactaacttttcaaagaaaaaatgaaatctaacaacgtcgcaaacctacaaaaaaaaaaaaaaaaaaaaaaaaaaaaaaaactctgaattaaccgccacagcagttaatgtaggaatgtcaagatgtaattgtatgttttttattttttttatcttagaaatacataattttacaaataatttgcaagtctcatcatttaaatatcattcatatcatattaagtcattaattcaagattcactttaattaagtatatttgcgtcccgagacacgccggaattaccagcaggtatatcatcggccggggttattgttactaatactatatatatatttctttttacaattaaaatagtcttaataaactcacttgtacgtttccattttatatgtaaaactaattgctgtggcggttaattcagcgctttgtgagttgtcgcaaacttttttacatccagaatgttaaattagcatcctttttttcggtgtatgccgatcgatcatttttctcttgataagatcttgaatctttggtgatgattatggaacagaaaaatgatgacgatccatctttgattaaggttctccatcggccctaaaaaaaacttccaaaaaagaggggaaaattggcctcttaacttaatctgtctaccttgatacgacctaatttttcgcatcttccaatttaacgtgataaagaattttccttcaatcaatgctatgggaaatcgcgtatggcgtggaggattcaaaaatcatttcaaattaaatatactttacagacgcagagtggattgagtcaataggagaggtcgaacaaaatttggaaactttaagagctcataactccattaatacaaactttaaggttctaaaagtgtttcctcgtgaaattttcttcaagacacactcagggccggatttatctaattgccgcccatggccacctgtattttgccgcccctttctcattcgttttgaaacatcaataaaaactatcaggtaaagtgccggaggggaggggtgcataagagcgtttactcgtgttggaaacatttttttgcgaaagccccgtcaacgctattagcaaaatttcacggaattttggtcgaaagttaagttccgtgaacttatctctatgtggacaaggccttccatttataagaaatgaacaaaaaaattatgaaagaaccaacataaatgtggtttaatgatttaaacttctgccaccgcgccgcgccgcgctgactgcactgtgtttgacgcaatgcgtgaagtattcatgcagtcttgtaggcgctgatgtgtgttaaatgccgaccgctgcgctgagggcatccttttcatctcaagtcctcgtcatcattgctctctgcaccgcgtcgttccagactcgactaattaaaggttctgtctcttgcatcaccgaaagacgacaaaattagaatttactttactttctggaaatgagagattttgtcgccttttcttgcctgtaattttttctctgaatccaatttttttcaatacttacatttaaaaaattgcaaaatatgccgccccctaaaattgccgcaatgagccgcggcccatgtggccaccccctaaatccggccctgccaacagtttctccatcaaatgcctcttacaaagtttaattgaaaaggtcggtttgcttcactgaatgctctgtaccaatttttctctcattttgacatgaaacatatacatatttttttttttataaaagattaaccttagttaatttaacattgttttatctatatgattttaattatcttaaatcaagtgatttccagactttttgaaatttatgatccacatagtttctttcttaactttaggcttaattggttatccgtttataaaatataaaaatatcagggggtaggttaggttctttttctaatcttcacaggctattcaagaagcatcggccaacgaccaaaaatttataaggttgtccaatcaaacaaatcaacccttatatagacgaagaaaaaatgttcttcctgcatccctcagcgaatggagatgttgcatgtgtgaggaatttgcgatttgactattgattcttttgtaaaattttgcgaaaaacacgatggtgccactggttttctctgaaatcaactcccaagctcaaaaaaagctctcaagatgaggccaaaatggaggggatatcccacgctattctgagagtccacttttacatcaagacaaactctccatgcaaagatagggagcaaatacattgacaaggctgccattttattcggggactctaaaactgaaaacccggcatccgtgctaatgtatttgctccctatctttgcacggagagtttgttttgatgtagaggtggactctcaggatagcgtgggatatcccctccatttgggcttcaacttgagagccttttttgagcttcggagttgattttagagaaaaccagtggcaccatcgtgtttctcgcgaacttttacacaggaatcagctgtcaaatcgcaaatttctcacacatgcagtatctccattgtcctcaaaaacagaacccgtgagactaacagaatggaccactagacaaggtacgaattaaaggattctgatacctacatgttttttaatcaaaatttcacgcagaacacgattcgcgcaacgaaaatgactgaaaccaactcctaacgaagatattaatgtttttatttcacattggtcacgaggaatctgaactgcccgctcacaagaaactcaaagctctacgtgagccaaatcgcgcactacaacggtttcagcaatcttctcaatcgagcaatgttcatttcccaccatgtgttgttcaaactgcaagcaatttgctatagctgagccaaagcgtcaagattgaagttgccagatttttatatcgcagagactgtcatgataaacgtttagagcgcgatgtgaatcacgtagagcattgagtttttcatgagcgggtggtttgaattcacgcatcaaaattattgaatatcttcgtaaggagttgattttggtcattttcgttgagcgcatcgtgttctacgtgaaattttggttgaaaagcatgtattagaatgctgaaattcgtaccttgtctagtggtccattacctctgcttgaattctatttcaagcgcatttttttaggactcggatgcattgcatgcgcgagtgtccgcggtgacagattcacgcgtgtccacgcattcctgagtcggatcggaacgggggattgtgcaatggtggtatttcgcatggacagtccgattcggttcagtggttcgaggtcttggacgccgcgccgctctgtccgccttcgaaccctggcccggcgccgccgccactccgttgtcggcgttgatcttgctcgcaattcggaccctactcctccccaacaatcaaaccgcaccgctttaatgtctaacatcgccaaggtttcacacacgcattgaggaaaggctattaacgttgatttatctcttaccaaacagacctaattcgacggagatgaatcaatccgtgagagctgttattttgtttttccttcactgaaaaaagttaccggttatatagacataccgtccgttctgggcccagatgccgaaaattacgggtgctggagccgtagcttccattgccctaggtgctacgcccggaactttcggcctctgagcccggaacggacggtatgtctatataacttgtaagtacggtttccaaggccggagtttttatttatttttttttcagtgtttctgttgaaacaatgaattaattttaatccagtggcgtggcctacttaatgatataccgattattgatctgccacttaaactcgaggaaaagtatagagaaacagggtgtttgcgacgaacacctgaataatcgatttttcgccatagctacatatggagaaatatcgataattgaacattcatgcttcgccactgttttcatccgatatttctcaccaaataatcttgagagacctttgaaatggaccaaaatcatcgaggggaaagtgacattaccaagtttcgaaagggcgaaagcccctctgtatccctctccgaaataacgcctccggtaataatcctgaggtaataatcctacaagtacggatcggcattttcacccgagaaatcatttaatgaagagagtgaaggtttcgcgaagacgtagatgttaacaagccggcgaagttgctgcgatcgatggcgtattatgttggatgttctctgaaaaagcctcggtttcgtccgcggatcgcaacacggcgcgctcagctagttgtattgaaagcaaaaagccgcgcatgattcaacgggactcagtttccgacaagctaattctgtcgcatcagaacccgttccgatcggcttcggcgcatgcgcactccgcactctgcatctgcagaaagttgccaatttcgtgtttcaaattgcattcatcgtgtgcaattagaggcgggaccgattgttagcccaagtccctgccgtgataaggaaaatcgccgtataaacctttaagccataggcgtacctaagccattttgcaagggagtcatttggcccccctaccaccggggggtccgcggggcctccccaggaaattttttgaaatttttagttggaaagaaaaatgagagttatttttaaaaagcgagactagcaacttttgtattgaaaagccaaaaatcggcgaaagcatatctggagatttcgtattttatcagttctttttggggaaaattatgcaaacaagacaataattctatttttttatccaaagtcaactctcaagcctcaaaagagctcctaaagttaaggacgttgtagcaattgtcgtaaattttactttgttgacttttcttaccttgcgttaaagtcactgagcatcttttatgtgactacaagaggacgtattaggagcgcaatcctgttttatcagagagtgtacctatttattcagtcaaattttcttcgccaagatggggctgaaaacactctctgggtcgccataagcggaggatatacattaacagcttgaaacttgacattcccacacttctggacgacaataatcctaccaataattgatcccaccctgtctaggcataaaaaatttattggaattgtctatgcagccatgagcaaaaagataatgttttttgaagccaatggggccctaacggtgacctcaaacaaattttgaaaattcagatgcctcaaatgcaacatatttgagcttgaaagtctaaaaactagtggctaaattttggtcttaaataattttacacggaatagatgagtgaatcaaaagggtccgctagctgtaacttatctaaaaattgacacaaaaagtgatagacaaagtgatagacaaagaagacaaagagaaatggagcgatcctgttgcggttgaaacgggtggttgatacggactaagggataaaacgatggactaactaaagggtctcagtggatttttttttttttttttttttttttttttttttttttttatttattgtatctcagtattgtacatagttaatacatagttaatatgtttaattaaatgagtaaaaataagattagagtctcagtggatgccgttatagtcagcccattagctacgtcctttgtctattgcagccacccgcttcaaccagtgaaatcgctccattttccctttgtctgcagctttgtctatagctttgtccatacacgtgtctatctatttcaataatcagccctgagactatctcccctccaaaaaatttgttcctctcatgaaaatcggcccaagaagcggcacaatgtggcagagctgagggccggtagaactggtgcaccggcaatgggcactgcacccgcataggacgagcttaaagctcaaagttgcagcaaaatgaagggcggaatcggcgggaaccggactggccggcggcggcggcgcgcgcggagccgtgtccggaatcacaatgaagacatttcatcgcgcattcattatattccgaataatttacgcctcacatgactaagtgctcaagtttctggccccgcgagcttacgaagctatataaattaacacggacaaattacacacgcgtagactcgagccgatggaatttagatagaaaatattatacgacccgtcaattttttacccaatcatttccggggtacgttcctatgaataaacaattcattgtggactttgaatggaactttcttcgtgtgcaattgagaaatcccgcggttatagttcttgtttcatcgctcttctcacgcaaaagcccgctggaaaaacagtctcttgtcaaaaaaaaatgtcttttgtcttaaaaaatttgacaaggaaagcaaactctcgattcaatcgaatttttggttgaaatgagagccaaacctcttaattcaagcggatttccttttgattcaagcaaaaatccgatcgaatcaagagtaatttttcttttcgatgtttttaagagtctagaatctagatccaagagactttttttccagtgcgtatttcgattttcacgtgagctttgttcccgtgcagctctgtgctttctcgagctcatgtgaaaatagagagatacaggatacacccttacaaccggagagcggcaattcatcatgatcaatttggaatcaaaattcaaatcataatttgcaataaatattcaagtaatttatttgtattttatgggatcagagtatgatttgtgacagctggcttaataattggacgtatttctatcaaacgaaactaagcgccgtaggggaaggaagagagaggggggcctggattggcgggtgttgcgaaccacgatgctcgttccgtcctatactcgcaatgcttttctatggcgcttagttccgtttgatagaacgcgctatctgggattctaaaatcctcaagaggaactcaaattggcgcttagttctgtttaacagaaatgcgtccaatttgctttcgctttaggggcaggtttatcgcacggaaaaaaatctctgagtaactcatgatcgtcgggtaggaaaattggaatttgagttatcaatgaaaacactctcttgtgatagcccgaagagttaagtgtggttggtttggttcattagttgcattttaatccaatactgtcaaattttgaattttgcaaagtaaaaatttgaatagttttatctcaagacgacccttttcagaacatgaaacctcgatccggcacacaaggaagagaatttcgtctcaggtggtataacaatattttcggcccggttatgtccgtcatcgatgccaaatttataggtgtcactaatcgataactttcgttaccttacactgaaaactttgttgttccccatacgaacttaagttcgatctttgcaatcgaaatttgtacctccatgcgtaattttggcttgtttgacgctctcaatgttctgtgggtcaacatatttggaaaagatttcttttagaagtagaatgaagatatgaatgaattttaaatttgccattgccaagattgccagggtcgcattatcaaatacctaattttttctttcggcgttaaccctagctttatcaaccgggttaaaacaggctcataaaaatgagctttactattcattaaatagaaaatatacttgcaggacaaaatatatttcatccttaaggtatttcgccccaagcgaccaaatttgaggggctcggaggacgaggcgcatgagtgcagtttttgaaaaaaaaaaaaaaaaaaaaaaattcattgatttcaaataaaactagtcttaatacatatcttgaggaaagctctcccccaaattccaatttttaagtatcaaaaagtcagtttgaactttctttccgccataaggatccgtgtaatttcaaaacttggaacacgtatttctcgaaatagcaaaaagtgcgcttatgcgccttatccttcaagcccctcatttctcaccacgtgctgggtaccccacttaactggctcccctcgttcaagttcaagcgatcatgagcttttactcatgttgcacgttgcgtatacgacgcgtttgagtttacatctctaattgcactgtttattaagtccacctcaagcaaaggggagtgaagtgtgtatcaagagtaattaattttaaagctactcgttatcgctcggatttttctcgggcccaagttcaagtggaaagaggagaaagaccgcctcttatcggcgaccacgaaagtaaacagacgccaatatcactcgtcagttgtcacttctctgacgtaaggtcgtaccttattttcctcatgagccgcaaaaagcatggattcgtatgtgagacagggctcacgtgagaattcagatacgccttttcgttagaggagcaaggatctgtggtacctccgcgacagagcggctgagcgaacggtgtccaggccaggcgcacgatagaaagtgaatgtggaaatgtaataataccacttaggacgagcattatcgctaggctcccgacgaccgagcgagcggtcctctgtgcgtgagtctgcgcgtgcaaagtcgtcgagcgtcgagtgcgcttgcagtgcggtgtaaacagactccgcggcgtaagcgccacatcgaccgtaatttacggggtttacggcccgtaaaaccccacgttcacgtcattaatagttacgatcttgaaattaatgcggtctgcttgtttggactttggagagcaacaaacgaaggtattggataggaagaagttacctatgtttgaagagagagtatggacacgcgggccttttcagaccctttgaatccaggaaatgacgtcgcctttcgacggaaggggatggttgccaacttttgacgattatcacttatttgccaaccttgcttaaaagttcgcttatcgaagttgaaagattttgcagcgaatattgctccatacttcacatcgaggaaaaaatagtgctgatccgtaaaaatatcttttacgctttttaaagaatcatgccaggagtgtgatcacttcacttttttgtctttgagcctaatattgatggccaaagtgcggaaccacgtatttctatcgcggtgtttcaaaatatctgcttctattttatttattctaagagaaataaaccagttatataccttgaattgtataactttaaacctaagaggaatactaattctcataccattgccagcaaggactcttatactgcgcttccaggacttaatgtccacctaccttttgtccattagataaatgtccaccgctatttatgtccactaaacgttaagtccagtctttatgaagtccacaagatttaatgtccaaccatgaataagtccaaaattgtccaaattgtggacatgttacgtccacatttttttcttctcatttaaatgacaggagccacctcaaaaataaatgcatactacttctaccttcattcttaaaaacatttcattcatgaaccaagttatgaaagagttagttagtacagactctaggagcagataaaaacatatgttcatgtgtacactgtacggatatgataagatgacaaccaaagcgggaaacgctccaatgccaaattaaacatttttcagtaacagatgcagtcaaaattgaaagtcctctttaactagttatttcgtgcgccttcaatcttgtaggatactgtgcaacgcctctgacgcgaaatagttgcttaaagcgttgcggcgcggcaggaaaccagcgtgacacgcgcataggcgcctacaaacctaacgggatacttcaagcgttgcgcaatgcgtgaagtatcccgttaggtttgtaggcgccagtgcgcgttctgcgctgcacgccgctccgctctgtgttaggctctaatatttaaactcgcggagtcagcgtttttcaactcatgattttgaaatgatatttgcactctctgcatttattattcccttttaaactgatgaaaaagaaatatgtactactggaaaacacaatgtgttttttgtaactataatagtggctccgtgtcaaatgtaatgatttccaaagcattcaaatttattcttttatgttttgggcttttactgtgctgcagcgtggtataagcgcaactaaaggctcaaaattggacgtgtttgactcaagaagatcgatttacaattaagttataaacaaaaagttgcgtgcttctagtttttttcctcttttattaatttttgtatagtttctttcatcacaactacggctcattgagattcatatcgatgccattgcttggaaaaggttttacaaatatttaccacgttttaaaaatgcaaatgtttttaaaatgaagtaatcaatttcattaaaaaagaatgtacatttaaggcatattttatatcggaaatttcaagaataaaaatgaaaccaagtatttaccaaagacaacttgaaaagatgaatcaaaagaagaaattaacatttcatttaaaatgtgagttacgataacaacacctcattctctcttaattttctcatttcgatattgtcaatataattttacacacggactaaaatataacgcttgaatttgattttagtagactttacttagtggacgtttaagtaatagacttaacagtagtgtgggcttcagaactgtggacgtaaaaattgtggacgaaaagtctgtgaacgttaaaaaagtggacatatagtctgtgtaccaatatactgctatattaagggaaaatgtagtatcaacattcgaacgttcccgaatttcttctcaaaatacttgcattttctacaaaactcgagaatttcttttagaaaaattatcagaggatattatttgtacgtgttctccagtgtgcctaactttcaagcaagaatgttgataatttatttcacatttaaatattttaaggagagaactttggtattattcgaacgttcacacggccttataccctagcatggcatagtaaaggctctgtttgttttagctctgtagcgctggaaaaaaaaacacattgaatctagagttcagactcttgaaaacattgacaagaaaaaatactctcgattcaatcagatttttgcttaaatgaaaaggaaatccgctcaaattaagaggcttggtttttgatttaagcaaaaatccgattgaatcaagagtattttttcttgtcgatgtttttttaagagtctggactctagatccaatgtgctttttttccagtgagagaaaatgtaaataaaacggcaacaggatgagtttgagcgagacgagtcaatcggagacggggacttcaccggtaaaacaagtggcggagttggttatactcgggtcctctttgtttcttttattagccggtcttttttgcactcgagatcgtagtcgtagagactgccactctgatgtcaccggactggtcacgcactcgcaatcatctgatcagggtgaacgcgccgaaagccagtcgcaattagaaacttctgtagtcccggaaggagcgttacgtcacaggtggctgggactcggagcctttaagggcaatggcaaagatacaggtgtccgttctgcagtccagaacaggagtgcctccaggcgtgcttagaaaacaacttgccatgagattaacttctgagcatacagtacatatccacggccaagtacagagccacgtacctacattgcagtgattcaaaattttcgctcctattttatttattcgaggagaaacaagccaattttaaagcttacaatttacacagaattttctgctatcagaattgataatttcatgaagttttcaattaataaatttgactcgatttccgaagaaaaaaataaagtataggtccgggaatctgcaacgtcgcacacggaaaagagatacgtggttacttacttcggccatcgacgtattgagtacacagagcaaaattgtaaaataccactccaggtatgactcttaaggtgtaaagatattatgcttacgttttaacgctatcttttcctcaatgtgaagtatgaagcaatctttttagcaaaaatatttgaattaataattttcctttaaaaactgataaaccgagtcaacattagtcatcgtcaacgcagaaaaaacgctgagagtagcccaaacagacgtcagtaggcggtatattctgttaaaaattcaacagtccaatggtctttgcctcgctcgtttgcattgtgctacgatagtcgataagcagctagatctctcacggtctttactcacgtttgcaaaaataaactggttagtatccactaacctgacattgtttactcgttattcttccagaaaaaaatataaaggttgtttaaaaaaaaaaaaaaaaaaaaaatgcctaacgtatcgttttactaagtcactttttaagggaatacttaatttgaaatcttgctttgcaatttagataatgcgggttttaagtagctttagactttctcctctgtacgaaagtattggttctctaatacccttaggatgattttgcaaaagtccaattattgtcgccctggtatcagattaaggtagcacgaatgacgtgataagactgcagaacatgcgaatgttctccctccgaactctcgcaaaaagaaccattccttaaccttaagaagtgtgaacgtggtatctccaacgaataagttacgaatattaaactacttgcaaaacacgtgtacttcaacgctcatgatgttgacaagataattgttgagacaaattttaatgtatctacagcacaaaaaaccacaataaatgatgtattttttcaaaagtttttccgcaatgagaacaatcgaaagttgaaagaacggactgttgcctgaaaattaataataatagattcagatttctttgactaaataagtctcttaaatccataaaagaaatgatttctcaatatgagcagtgaacataagctgattctgctggtattttcatggttcaaagagaattatatcgcaaggaagaattcgtatggttttgtaaagctgtgaacctggatactaagttaatttttgcttcgatttctgagattgactcgtgttctgctctccacagccgttgaaagctatatagggattctcgtagatttaaacgcagggtaagaaaagttaacaagataacatttatgacaatcaccaaaataacatccattttgagcactttttgtgaacctacaagtcgattctagacagaaatcgtcgggtacaatatgttctgcaattgtttcaaatgcataatttgctaaataaccgatttttgcatgatatgatatctggtgtatttgaattaatccatcgttacatgaaatacataactgatgatcattcaaccgtaaaattgttttaaaggtgatctcaggtaattaagaataaaaatgcggtggatttcatcagtttatcgcattcttttggcctttagtgagtcaaactgctggtattagatttacataatcaaacataggattttattcgatgatgaggagtcatttttcaattaatcacataaattggacaagcttcaagctggacaagttgcaaaaatcgatcattcagaagattaaacgcatgaaatatatttgcaaaaaatatgatatccaacgtttttcttctcagaatgacttctcaggtcgatcacaaaaaaaactctccaaatcacactacattttgaaattcgcaactacaacttctggttcagtacagaaacaacgtatgtgccattagtttccctatgtacataagcctttttacggacgagtcagaaattgcagagtcgaattgctaaaatgaagtccatttgaggttgccatagtagttgctataaactttgccatgtttattcttcttaccttgcgttaaagtcaccgagaatctccaaatggctatgcgaaagtattctctctacttagcgcagtgatttgaaatttgaaatagaccgatactcattcacgcatcgtagtttacgttcattcatgcttgcttcccgcggagatggacgctagacgagcgacgactcattgttaaggccacgccccctctgctcatcagcgtcgatctcactgtcaccgcccgccgcacagtgggtcgagtcaatagggtcggacaaagtttgtaatcttcaaacgcttatagctccgtttatacaaaactttgaggttctcaaagtggttcccttggtttcctcgtgaaactttcttttaaaagcactatttaaaatttaaaatgtgacgaaatatacatggaaatttggagttttagtcgaaaaattcatgtgcgagctctctaagcgactggatccaccgtgcgtcgtcggctgtcatcgttgtcgtcggcgtcgcgtgcgccgctccagcgatgacataacccaccgtcagccgtctgggccgtcgcaaagttccaggtgaccttagtgttactcacgtgaccttaaactcactgatccgagtctaaaacctcttatccaacagctcctgagagtcctctcccgattttctgttgacctgctcatatttcgccgattatcaaatgagtaggaaccgattaccatggtcaagatcagacaatccttccagtgaaggagggggtctagaccccctctccttttctggaaattttttccaaaaaaatcagttttcgtgatcttcaagtatgtttttacttttggactctgtcctctcaatgaaaacacattttactgtaaatgcccttccctttgtgaaaagtgaaacatttacgattaattttactctcttcacatacagtctgcggggtctataaaactttcttcacatgcctatattttcccataaattcactcataattcctcataatttaagcgattttagcccctgaaagttgtttgcaagtatgtttcctaatatatttctaaacgcacacttttaggcaataatgcaatctctgtggatgtagggcttcgaaatgcgacgcatatttgacaaactcaacaaacattttcactgaagtttttgattaggaaatacaatatctggctaattttagaaacatcgtattatgtgccattaggaacctcatgcagattggggcatctgtggacgagctagaagtgcagttccttattgcagaatgctgtccatttacataaagttgtcaataatgtatatgaatttgaccgcacttcatttgagtaatgtttgatgtctttaaagcaaatttcatgaaaatttatgcttttgaagtttcacgaaaagagtcaagtctaaacttgatttttgagtaaacaaaagccatcggaagtctgttcgactactggctatctgagatgcagaaataggtaaatgagagttttacctctgtaatttgtcacgtatactttatgcaagtgcggccaatcgcttgagtaggtatgaggaaatgtagaggagcagacaacctctaaattcaaaaatgtattggattaattgcctaaaatttttagttcatttcaaaaatacgaccgataattcatctttagggagaggttaaatggtgggaaatgtctcaatgtaggagaaagttcaacgggtactagtgtctgccgctcgcaaaaagttaccatcatcggcgaaatatgtcgggcttagaggagagggatgctgtcactctgccacatatgttccatatcaatagtgtaactgcagaaatgcgtacagttcagttgcggtttcaaaatctccgctcctaatctattttctaaaaggcaaccaaaccaatgttatagcttgaaatattctaagaatattcctctcactgagagggaaaatcttcaaagttttcaagaaattaagtttgatggttttccatgttaaaaataaagtatgacgggaagtttgcaacgccgcgccgccaaccgacgcatttctgcagtttcaccatcgatatttccgctgattgtgcttttggcccaattattttaccagcctctctctgttaaatcatgatggaacataggttgcatagaccaagacgtctcatttgtttacctctttttgacgaagagtccacgatgacatgcattttagatgtgcaacgcgataatccgatagtgccctcggcgaagatcgggacagttggagggaaactgcccttgattacctaactgcaccagaatcggcgcatcagctcccgattaattagatcacaattagtaccgatttgacagctcgttggaaaatcacactccaatcagtcacaattactagctcgcaatcgtcattaaactaaaaaaatctctaaaacaccaacatttagtgaatctctattaacttcgtgtgattctatatccaagttaagtatgcctgtgcgacataagactgtgtttgtaaaattgtgtgaggtttagttcgatcggcggatacttcgccaattaaggcccatcgcaacattctttgccggatttaagaggctactcgaagagtccgaggcgattttgacgtcagctggacccgctttgaaacggccaagtttccccaacttttactttcaaaccagaagattcatttgacagtcctcttttatgagtcgtaaaactcaaacaccgagtttttatcatcggttaattgttgtgatagtttccttttctaattactgaagtggctcccaaagcatggctagcgagtaaatgttataccgtggctcatattgacacaaaatgacttaagcgacggctgatttgaagctcgaatttgaatacttgtgagataagttatggtgtccctgtttggagttacaatgaaaagtgtgtggttcaaggcgccagtattggtaagttttctgtacgagccttatcatgttgagtacggcttttttgtggggtgtttgtattttccttgatttttttgttgaaattcaggagtttatggtggcactgttttaaccgactatcgggactggagtatagttgaacttcattttgaaatttggaaccaaaatttctggcttagtttaaaaacaacgcaagtaccgttcgtttctctacgcccataagtgtttttacggatgagacaaaattgcagttcctaatgattgcaaaatgaagtccagttaatgacagagagagatagatttgtttggaggagatgaatctccaaaaatttccctatgagcatcaaaatttatcaaattttcttgcataaaagtaacatttctccttcatgggggagagatcacttttcactttcctcctcctcctgcactaacattccagaacatttacgctgttttaaaattggaagagattctatgataattttagaatcctgtaacattatggtttcaggacattccgtcaacgagtttttgtccgcgcacctattttgtctagtagtttacgtccacgcgtaaaataagcaacagtgacttggtccaagcgttatattttagtccgtttgtaaaattgtattcacaatagaccaatttagtggtgacgtcacggagcgatattgttggttcgatatctcgaaagtcgaaatgtgccccaacaaacaaacataacctccaaaatgaacaattgacgaaataatgctaaaactgcctgaaactaaaaaattgctccatgggactttaaaattatgaaagctagccatttacaaaaacgttcgagatcacaatcacaagaattgattgtataataagctcgtaatatcagtgacagtcataaagcgaatccccctaccccccctgcctaaatcccgcagattcctatatgttcgtttgttggggcacgttttgactttcgagatatcgaaattaaatcgagatgtgacgtcacactaaattggtctatatcgaaatgagaaaattgagagaggaagatgtgttgttatagtaactcagtttttaaatgaaatgttactttcttcttttgattcatcttttcaaattgtcattggtaaatatttttttttttatttcaatccttaaaattttcgatttaaaatataccttatacataccttttttttttaaatgaaaataattttcattttaaaaacatttacatttttaagactgggcagatatttgtaaaaccgtttccaagcgatggcatcgatattaatctcaatgagccgtcgttgtgttgaaagaagctatacaaaaatgaaaaaaagagggggaaaaaaccaagaagcatgcaatctttggttttaacccatttgtacattgatcttttagactcaaatacgtccaattttgagcatttggttgcatgtacaccttgttgcagtactgtaaaagcacaaaatatagaggataaaattaaagtgatttggaaatcaataaatttgacacggaaccaccttaatatttgcaaagtacgcattatattttccttaagtatctattatttttttctttttatcactttaaatgagactgatttatgcagaatgtgcaaacatttcgaaataatgagttgaaaaatgctgtctccgcgagtttaaatattagagccaaatagagcgaagcagcacgtggcgatcgtggcgtgcttccagctcgacacgcgcattggcgcctgcaaacctaacagggatacttcacgcattgcgcaatgcgtgaagtatccccgttaggtttgtaggcgccaatcgcgtgtcacgctggtcgccatcacctgccgcggggcttcaagcaactatttcgcaacagagttgttgcacagtatcatacgaaattgaaggcgctctgacgttttaagaatgacaggcatcctttaaaagtccggagctttcctcgcaaaataaatcaagatattccggcacaaaaagaaagcggtagtccaaaaactcaattagtcctagcacccatgtttaataaagttcagcattatttttgaattacattagagaaaaagtaactcgatttaggcagaaacattcctcagtatgccgtcaagaggattttattttgaatcaagaataaaatagctgaatgaaagcgggattctacttgatgtaagtgacttttctttgtatacatgtcttttcttctttacacaagcattattttttttattgattcataaagaaatcttctcggtggtaaatttgagcataattctgcttgaatcaagtcacttttccctttagtgaagttcaaaaacacgctaaacgttattgaatacaggtacaaagatttagtgagtttttcgaatgcctctctctttttgtcgtcgtcactcgatttattttgcgacggaagtttgtgcttttgaaagttgccatcaatcatgatacgttggggcgccttcaatctcaaaagatactgtgcaacacctccgaggcgaaatagtaagtagctcgaagcgccgcgtcacgccggcgccgcgccgtcgccgtggcgaagttatcgtacacaggaacaatttaagagcctctagccgagacaaattaaaaggtttattcgattctggtatgacaagatggggttttcttgaaagataattaagacctgttgcaccaaagaggtaaagagagttttagtgaattttccccaatggaattgacgctctcccatctttaccaaaaatctctatcatttatttttctctgttggaccagacaagcaaaccctcattctttcaagacattttacgttttcatccaaaaacgttgtgagcaattattgtcgtttgtacatgtggaccaattaattttgggtctcaattggtaggtggaccaaaactctcttgccgaaaaaatgcgtggatgtaaactactagaaagaacaggtgcgctggcaaaaaatcgttgacaaaatgtcctgtaacctcaatcatatatgatgtcttatgcacggatctcactgaaaagctcaaataattacttggtaattaaacgttttataagttgaaaatgtgcctgatgagacttaaatattgatctgggtaccttagtattaactttaaattctgaggtataattaattataagatttacagcaacagtataatgagatcttgccagacacatttttgacaaaaatatgcaatatccacggctaatactttgattctcttttattaaaatgagatgctggacacaatttataatttttgttatatttcttaaaaatattatgccacaaaatgcaaagaagtcagtacgaagagatgattaacttatgcatgcaattcccacagaacagtgatattccattattgtcctctattatatgtaagtgcgttctttcaacactctctatgtagatagagttttctgtgtgatgacatatacaacgagatggacaaaagaattaattgatctttttgtaatataaacaggaaaaaatacaagaaaatatgagtttaaaccttagtgactaagtaaaaacaggaaaaggcttaaaatgaagaaaggtaacaatgataatacagatatgtaaaagtaaaagatggtcaaaatacggtaacacgagcaaacggaagctattataccttcgaacaagtttttaaagcctttttactaaataattctagtacagttctaccttagtatatttcctaatctcaaaaggcctcatcaaattacaccacatcttcaacattgcaaagttcctctcatcagtttctcctacaagttgtgggtagacaatttgtgttacagttgtcattacattcaacgcctaatcgtaaaatactcatggctacaggcgccttcaaagacttgatattagagcactggagcatttccgttcactgaaatcactttgcatcaaattttattcggcttcaaaggtcatttacaattttcagtatcatttggtcatttccggttttattgcaaagcgctattcccaggtatttaagaaggagaaaacgaaagtgggtaggagatttctacttttaatgaaaaattcatcataaataataccaatatcactaaaatttttcctgtgtttttagctatgctttgcattcgttcacaacgtcatgcctgaggaaactgggtccgaaaaaaaatcggttgaagaagaatgggcctctcataatgatcgggatcacaatgtaagttcatacctcaactatttctgttttattatttgtccgtaaaatactctaaaattgggttgggttcaggagaagttatgaacctatattaaaataaattcgaggaaagtgggcctgaaattctattcctttcagcttgttttgattttatgatttttacaccatatttcctagtattttcctagtatatccatatttctcaattctctctctcaattttgagcttctgcaacaagaattcttacgactgtttgagcttaaaactacttttgagttgactttagctaaaatttaggctattttttctgtaatgaactcaggccaaatagatataacagaatagatcatgaaatgttttgaagcaaaggtggctaaatatgtttgtattgttgaaaaagaaaaccaatcagttcaatccgtcgctcctctgacgcaaggactatctctatttccacaagagccttggaaagcatgatttatacggagaacagggctcacgtggaaattgagatatgcccttacatcagaacagcgatgaattgacgcacgagcctcatctgatgatcatattttcgacgcaagtttcgaagacaatgtaaattgatcgatgcagtatgatccaagaaaactgagcaagtgaattttttaattagataaactgttgtttttcaattcaaaataaggagaggttgaaaaaagaaagtgttattcatcaaaaataaagaagttagtcctgatactactagtgggttagaaaaaaccctgtttttaccagtgacataagtttcaacctttcaacttaacttactaataatttctcctaacatctctaaagccctgaccaacacatatactgccgcgctaagggagaacgccgtatgagccttcagacgttgccaagtttcttccgataaaagccgaatttactaagaaaattgcaaatattgttttccaaaattttcagacaaattcgcacgcaatttaatctaaaatatcctaaaatttcaaggaagaatatgcatgaatgttcctaaaaataaatatattatcaagggaaatctggcaacactcgaaggttcatacgacgttcttccttagcagtaaagacaatttctcagcgttccctctgcaattatgagacactgaaactggacttcattctgcaagtaggaattacaattcctagctcatccgtaaaaacacgcatgcacttagagaaaccaagggtacatatattgtttctaaactgagccagaaattgcagttccaaattgcaaaatcttgtccaattttatggacattgttactttccgattcaaacgatttgtggaaagttctttgtaccgtgaatacgtctaatttgacgtctttaaattaattttttagcactcagatttcaaaagcaagtgatgcgacgtaaataaatatttgacaaaagcaataaactattggaggaaaaattatgcaagttatgaaatataaattcgttttttagggtcccagcacatatgaattcgggtatgatttggaagatcggaaaacgttcaatattcagcacaggaaggaagaacgacatccgaacggcacagtaaccggtagttacggcctactcgagccagacggctccataagaatggtccattacattgctgatgagcatggttacaggtaaaatatttaatgtctaacttttttcagtgagctcatagatggcaataaaagatgaacatacacgtcttgttgataaactgtccgaaatatcattatttaaaataaaaaattatctgtttcacgtgtctaaacttttgaaaagtaaaagtaaaaattactaaaaattttaagtataagtcatctattttggtcaaattttgggcaaattggtcaatttcgtcatgaacaattatcaaatatatgcgcccttccttcttctttcctttatccctttcttttttctttcttactttttttacagttcattttgagggtaaacggggagggaggagggccggaggcgtacgccccctaagcccctcccccttggatccgtctatacggtttcaggacattccgtcaacaattttttgtctagacacctgtttagtctagcaattttcgtccacgcgtaattgagagagaaggaggtgttgttattgtaactcattttttaaatgaaatgttacttccttcttttgattcatcattcatattttcattggtgaatatttggttttattcctatctatagttagttagttagttagttaatatattttaagccattcagcgtcacaggctattaacgtctttacagagaattttgaaaatgggtgtatacacgaaaatttagataaaattgtcgatttaatatataccgtatatacataccttttttaaaatgataatattacttcattttaaaaacattatatttttaaaacgcggcaaatattattaaaaccttttccaagtgatgacatcaatgttaatctcaatgagccgtacttgtgttgaaaggaattttacaaaaatggagaagagagagaaaaaaccaaggaggacgcattatttggttttaaaccgcttttacatcgatcttttacagtcagacacgtccaatattgagcgtttggttccgaatacatcacgctgcagcacagtaaaagcacaaaatataaaagaaaaattaaaaagccttggaaatcattaaaattagacacagaaccaccttaatattttcaaaacaaacgttatattttcctttactacattttttcccaccatcaatttaaatgagaataatccgtgcagagcgtgcaaacatttcaaatcatgagttaaagaacgctgattccgagagtttaaatattagagcctaacgttagtgcgccttcaattacatttgatactgtgcaatactttcgtggtggaatagttgcattggcgcctacaaacctaacgggatacttcacgcgttgcgcaatgcgtgaagtatccctgttaggtttgtaggcgcctgcgcgcgtgtcacgctggtcgcccgccgcgccgcggagtactacggcgtttcaagctactatttcgcgacataggttttgtgcagtttcatacgaaattgaaggcggtccagcgtatcaagaatgacaagctttttttaagggtatagagctttccttgcaaaataaatcaagatactacgtgacaaaaagagagtggtaatctagaaaattcacttggccttagcatccgtatttaataacgtatggcataacttttgaatttcattagagaaaaatgggactcgatttaggcagaaacattcttgagtatgccgtcaagaagattttattttgaatcaagaataaagtagctgaatgaaagcggatttctgcttgatctaagtgacttttctttttatttaagcatccttttttctctaaacaggcattattatatttattgattgataagcaaatcttcttggcggtaaattttagcatatttctgcttgagtcaagtcactttttcctctaattaggttcaaaaatcatgctaaactttactggatccagatactgggacttagcaagtttttcgattatagctctctttttttcgtcgtcactcgatttaatttgcgagggaacttcgtgcttttgaatgatgccatcaatcatgatacgttggggtgccttcaaacttgacactgtgcaacaccttcatggcgaaatagtaccttgaagcgccgtggcacgccggcgctgtcgcgaagttatcgtacaaaggcaaaatctaggagctttcagctgaggaaagtcaaaaggttcatccggttcaggtacaagaagatgggattttcttgcatgataattaagccatgttgcaccaaagaggtgtagagagttttagtgaattttcccccatggaattgacgccaaaattctctattatatatttgatcccgtttggccaactaaacaaataaaaaacgagcaaaccctcttccttccaagacatcgtacatttcatccaaaaacgccgtgagcaaatgttgtttgtatttacatgttgaccaattaactttgggtctcaataattggtaagtggaccaaaactcccctgctgaaaaaacgcgtgggcttaaactactggaaaaagcaagtgctcggacaaaaaatcgtcgacaaaatagactgctttttgcaatttggaactatgaattccggcccagttgaaaaacaacgtatgtgccattagtttccctatgcacataagtgttttttcagatgagctagaatttaaaggtccaaattgcaaaatgcagtccaaatgtcctatagccgtctatgcttgaatgccactccaaagtcttgatcaagtcattgaatgataacgttgaatttttagggccctggtggaaaaagcggacaacaactcgaccaagagcatcgacgcagccgggatcgaggacaaactggagccgataaaacacctctcggacgaggacctgatccacatcccgaaatccccgctcctgatctcagccatcgactccctgaaccaggccgcctcctccctccacgagatccacgcccggccctcctcccacccgtaccacggacgcaacgcctccgacttctacatcttcatccccgacaagatcctcgtccgccgcgaggtcgatggcaaaaccgtcaccgaggagatccataccggcatggataccacccgatccatcgccaaacggagtgttgaatcatcagcgtcgtcatcgtcttcgtcctatgctcgcgggaagatagacctgccgcccaactcgccgctccacaagaaggacttggagtttctcctggaccaggacgacccccacttccggcggaaacggcagctcaccgggaccaacgggcagtacgtcaccgtccagcaagaggggaacggagcgcccccgcagaccctgacctacaacaatcagcagaacgccccaccgccgccgcagcaggagggtttctacgagaagatcgcgcccaagatccaggacttcacccaaaatcttgcgtcgcaggtacctactatattatcattgctcaacttggaaaatccgtatacatggctaaggaacaacaacgcctatctgcaaactgacgattttgcaggacaaagaaggaactttgcaattaatcccattttgtggttagatttgcaatttttttaagtacatttcagtgcctctacagcgctcccacgcggaatggaccagtagacaaggcacgaatttcagcactctgatacacgtttcacaaccgaaatttcacgtagaacacgatgcgcacaacgaaaattaccgaaatcaactccttacgaagatatttaatgattcttgatgcgtgaattcaaacctcccgctcatgaaactcaatgctctacgtgactcacgtcgcgcgctaaacgttatcatggcagtctctgcgatgtaaaaatctggcaacctcaatcttgacgctttggctcagttatagcaggttgcttatagtttgaacaacacaagctgggaaatgaacattgctcgattgagaagcttgctgaaaccgtagcagtgcacgagttgactcacgtagagctttgagtttcttatgagcgggcagttcaaattcctcgtaaccaatgtgaaataaaaacgttaatatctttgttaggagttgatttcggtaattttcgttgcgcgaatcgtgttttacgtgaaattttggtcaagaaacatgtatcagaatgctcaaattcgtaccttgtctagtggtccattcttgcgtaatttatactgaaaaacgcgggaaagttgctaattaattttcgtcaaagttggtaaatgggctgtattgttccttaagtcctcggcatgtctatcacatcatttgaaaatctccgatcgtcgtcgttcctctggtgtaagggcgtatgtcgatttctacgtgagccctacaaagcatgaatttgtgtgtaaagcaaggccctcgtggagattgagatacgcccttacatcagaaggactacgctatgtcgcatctctttagagggaaaattaaccaaagtattcattggagttttctacgtgcagttgtttggaagagtaggaaaaacacacagagaatttctcgagctactgtcggtttagtttctaaaaaaaaaaaaaggaaaaaagggtggataaaaataaatctttacctgtaaaggaagcaagaaagtatatatataaagtcgtttcacaacgcactctggcgttctacgacacccaaacgccacatatgcctgtcttctcagaggttatcgggcaactgacaccgcaacatctcttcgtcaacgccctgccgccaaccctttacgggacgtccccgtcgcctcttcccaggtggtacccaatccaaaacttgtttgggcaacctctcctccgacattctttgcacatgtccataccagcacaactgcctggacatgacgtccaagaagagtaatatgagaaaatatttgcaatgatgccattagaaaaatagcaagaaagtaacatgagaaaatatttgcaatgatgccattagaaaaatagcaagaaagtaacatgagaaaatatttgcaatgatgccattagaaaaattcattttccgaccttagctgttgatatgatttgacttaaatggttttgcgagagtgcgcgtttcctcaaataaaaatttgttatccttgcacattttgatggatgacgttgaaaattgctcatttccttgcaacgtttccaaatctccgattttgatattattttatggacaggcgattaaccggcattttaagtagctctattgattagttcatcttcgaaaagttgaacacgtgtggaaatttgcaatgtcacaattgacgatatgcatttttaactatagccatctatttttagggagaaaaatgataaattttttgaagtttggtgtgaaaatgagaaaaacgcgtgtaatgatggaaaagttgttggagagcgcacaaatgaaattaagacttggatattga

SEQ ID NO: 22 - DNA, 138832 bp, Bemisia tabaci
  source 1..138832: mol_type = genomic DNA
caagtcccctcctgacgagggctgtgagtcaagtccacgaccgcgaagccacccccacgtacgctactcgcgccccgacgagcccgcgccactttccgcttgccgaacccgaccgccaaaaaaatgatcccccggcccggggagcgtgcccctcgcctcagaccccggatctgagatccgttcgtctacccatgagtcattttttccggcttttcctgccgtcgaaacttggtttccgctccccagcctgctaaccttcgcccccgccgaaccgccgaccgttcccaggtgatccagtcccccccggtacacagttttgcctctgatatgtaaaagaaaagtgttcccagggcgccagttttacgcccgtcttcttaggtgatttttttccttttagaaaagcagataataaaggaacttctatcggcgaaaaccaggtaagcctccattcttgtcgtcaataaaaaaataacttgatcggcccggaacgataattcgccccacgttctctgatatgtaaaagaaaagtgttcccaaggcttccagctgtagttttacgcccgtcttcttaggtgctttttttccttttaaaaaaccaaattataaaggaacttctatcggcgaaaaccaggtaagcctccattcttgttgtcaataaaaaataacttaatcggcccggaacgatgattcaatatcaacttatcgtgaggataactataaccgcgaaaaaggaaataaaataaaaaacccggaacgtttcgcgatgtcacaactgcattttcaacctggaaaaaaggtaattgaacgataaaaagtgagcctcgtcgctgttattatgggactgatgatacaaccaaaataaacgaacaagtgcgctgaaaacaaagcacaataagacgaagattactcgggtgttccagctccatctaggcccgaaaggcttttcatcaataaaccatcggacagggagaaaactcaacaaaaaaggttggttaatacgggaagtaaaacgcaaaataacccaagccttcggttggctctggggtttcatagcctctccattgttttcgacgctaaattcaccgtaaactgtaccaaaatcaacacaaaatttgaattggtttgcgtttcgcttcctacattaaccacaagtaacacatgattacacatattttcttatcagcgtacataacgtaggctgctaggaatctaggagcctaaatgtgtacagtcatgtaaaggtgcgaaggaaatcaatctgtggttgtatctaccacggtttggagcaaaagttacgccacatcgtgggagatactacccactcgcacaagttcatcattttgtatactttttcatcgaatttcactcccgattttctaacgaagtataaactaagcatcactttatacgtctcctattcaaaacttcacgaaaattcgaaaactccatggcgaaacatttaacatatcactcctaaaatccagcagaagtctttgtatattttccaattgaactaatttttattttaaatacttacatcttcttcaggaattgattccttaattttcccgttgcgtgactcgctttcaacgctcttgaaacgtcgaagaggaactgtgacataaagtggttgtttcattcgaatcttgtcaagtgcccaataattacgaaaatcaaattggatgtgatgaaggggctcaatgcacgaacatgtcaaaaagcattttcgttattttgaaaaaaccgaaatctggccttaaattaaatcctgtcattctgagcttttcaattgcagtacatcgagaccagctctgctcgaagtaggtactgcatatctcatttctaaaaaaccgcattttacacgtatttcaactcggtcttgtaattatacagtttgtctgattggataagagatgcgggaaaaatacttacccgtgtgtctgaaacaaaaattcgattactaaccgagagaagtcgatgagcaaaattcctctccgtcaagtgatcaacaaaaatatgaaaatttttcctcgaacgattgcgcgtgcaccagacttatcagaatttcagattttgaaaagaagtgatttcaagtattttttgccatgactagcacgcgtgaaattaagggacgagataactgaaaggaaaatctcgtaaattcaccaacttagagctggatcagctgatggaaatggctcaatactgattctactttgcttttgcttctaccaatgccactttaacttacatgcgaatatgaaaggatcagaaacgtacgaggtttatttggatattgcaacgttatgttgacataaattggacaattattggaggagacgtcaaaatgaccttttccgctaaaatgcatgtgtttcaatggaaaatgtcgcaaaatgacgtcactaggtggtgcatgttttcacttttaaatctatttttacactattccaatcagaaaatttttcttaaaaaaataatgcaaaatcagctctttaagcgctttcagatgaagcaataaaaagtgtgcacgcaaattctccattctaccgaccgttatttcacaactgtgtacacaatacactaatgttccggaaactgcacggaaaaagctgtgccttgctgactgattttactttcataacattctttttacataatgcaggaacgtgcatttttcgtattgattctctacgaatactacccaagctgcgccacgcatatgataattgacggcatttttcaccgtcatctgtacaaacgttttgttagagctcttcaccggattctaatagagcacgcatcaaacgctgataacaaggaacacaatccatacgaccaagagggctgcatatacgtgttcgcaagttcgtcgcgaggcatttggaggagggaaaaacttcaagccaagaccgggattttaaaagcaataaccattttcccccttctttacctacatccccttgtgctcccccgcactcgcccaccctcacaacccctctctctggaccatttcattttgcatatttttcctcgtgattttcctcgtgaattaattcaccgtgatcaatcatgggagtcgtcaaagaatcacttgaacatataacttaactgccttagccagggagacaacttttggaggagcgagatattttcttgaaactttcagataaacattgattccaatggaagctgttatcttaatctccgcttgaaatacacacgaagttaaagaggtcgttcccatactgctgtgcttaggaaaaacgccgtatgaaccttcaggcgttgccagatctctctaggtagaatacaaattttcacaaaaatgtgtgaatttttttacttcaaattttcagacaattttgcgcgcaatttgatctgaataatctgaaaatttcaagggaaaatattcatgactttcctcgaaaatatatattttatggaaggaaatttggcaactctcgaatgttcatacggcgtttttccttagcacggcagcatacctgaccgacgtatttgaacgcacgcatttttgacgtgctttaaaaagtctttcagcgttttgattttcttcacgctactttagttcgagtcaaatcggaatcgcaaagaagcggaggcactgccattctttgaaaacttgataattttaaagagtaagaatagtaataattttaaaaaaaattaatcgcaaaaaggggaaaaaaaacctgtttaccatcaaaacaaatttagaagtaactccgagcaatgagtatctcgcctccagtggcgtggcggcgtggcgtgctttcgattgatctgccatgtgaacctatgaaaaaggatcgacattctggctgttcgcaacgaacacattaataatcgcacaaaaatgaatatacatatgtattacgatttacagtatgatgtcaaggcgccaataatcaagctgcagaaaattttacattcaatctgccatgctctgacagttcgtataacaaccaatatatggtcaccgttttcaatggagaatcaacaacgcaataaaggaatcctcgtttttccatcaaaggcaaaaacgcaatcccacgatctaatgtgaaactagatttcagcctggttctttcagtacagcataaattattgaccgaaataatgcgcttcggcctcatggatagctttaaatctccttcataaagtgctaaaaatatcttcaaaattttaggaacaatctaataatttgttttcttctaaaagaatgacaagtaattaaacttcatgagacaaaattcaaaaacatttctggtttttacaaccaaactggcatgaaagatacatgcaggttcatttatttattttttttgcaatgtttgactttcgataaaattgccatgggagtttagaaccaattcgaccggttcccaatttaactgagttatgtcacagtgttgatattctgacgtcccatgaattcgttgtgacgcattaggttcaccgaaatcaaatatttatcaaagtaaagggatacgataggatcagttctttgagcaactcaacgacgaggttctgagggttggaaggacaagggaggtcattatcatgggagatttgaatggtagaaccggacgaaggaatggttctaaagttgttggacctttcggtgaagaggcgatgaatgacaacggtgtacgcatcattgatatgtgtgaacaaaacgagttgaaaatactgaacggattctaccaacatcgagatatccataagtacacgtgggttcagcaaactcgggggctgaagtcaatcatcgactacgcggtcaccaggcaaacgagtaccatgaaggttcaacaagtaagagtttgccgggggttctcctgtggtagtgatcaccactttctcaaggcggagattgcatttccggttaagtatgggctgcagaggaataccttgcaacatcagaagtgccagccacaaggaacgaagatcgaacaagtgcactacaacatcgatagcttacagcatgaaagcgtgaaagcgctctacaggaagcggctggatgagaaactgggagtagaaactttcgatactgcagaagagttgtaccagttcatcaaaagttgcatacattcagctgcgaaggaagccctgggtatgtgtaatgagagcaaggatgtacagaaaccctactggtgggacaaagaggtagaggaggtaattgaagaaaagcgtaggaagtaccatgactatctggcttctaggactgcagacacccgcggcgcgtacaggaaagcccaggcgagggttcgtcttttaatcaccaggaagaaaaacgagtcttgggagaccaactgctcaaggattgacacatacctggggggaaggaagagtgctgagagctggaagctgatcaaaggcctaagaagggacatgaaacgggacattatatctccgataacaatctcacagcttgacgaacattttaataaattattgacggaaggacgaccagagtttcaaacggggaatgctgaaaatatagtcgaggatcactcaatggaaattcgagttgaggaggtggtcaaagcaatcagggaattgatgaatggaagagctcctgggccaggaaacattccagccgagttaattaaatgtgggactggcaagttggttaaccatctcagggatttgctgcagaaatgcattgacggtgatgacatcccgaaagaatggaaagaggcctggataacagcgtcgcataaaaaaggaaggaaggatgactgtgggaactacagagggttagcggtgacaggaacgataagtaaaatttatggaaaagtgttgaaagcgaagatcgaagaggagtggaccccgttcgaggcggaggagcaagcaggttttagggctggtcggtctaccgctgatcatctgttctgtgttacccagttaaccgaaaagaagagaattgttggccaggagcttcatttagtgtttttggatattgaaaaggcttatgatagtattcctcttgtgaaactctgggaagtcctagaagaaactggttttagtaaaggacttattggggcagtcaagcagttttatcggggggcttttgctagaattaagtgccaaggaaggctttcagacggtttttttgtcaccaaggggcttaagcagggatgttgtctgtcaccgacgctgtttaagatatatctagagcacgttctgaaggaatggaaaagaaagtgtgccggcatgggcgtccctctaaatgaccaagaaacactgttcacgctatgctttgctgacgaccaggtagtcataagtcaagatcacgatgacgcggagtatatgacccggaagttggtggaggagtaccgcaaatggggcctcgaggttagtgtccgtaagacaaaaaagatgtcagtcggaggtgctcagcaaagcatagtcctggaggatggtcaacatatagaaagttgcgaacaatacaagtacctgggggtgaacctgacttcggatgggaagctggatcaggccattcgggaccgtaatcttctaggaaggaaagccatcgccatgcttaatgggatcctttgggaccaaaggatttccaaagacaacaagaagaggatttataactcggttgtcaagcctattatcacctatggcagtgaagtgtggcagttgaagaagcggacccaagaaatgctcaaggcgaccgagatggatttctggcgaagatcggctggaatctcgaggagagaacgtgtcaggaatgaacgtgtccgagagataatgggcgttgaggggacgattgtgcacgatatcatgaccaagcaattggtatggtatgggcatgtgcagagaatggctgataccaggttgccgaagaaggtgttggagtgggtccccccaggtaggcgacggagagggcgtccagccaaacggtgggtagagggcatccatgaagagatggagagatgccaccttccggaggatctctaccatgacagattcctgtggagaataggcgtcgcagagcgccctagcgcgccgtaaaagcggctcatacatacatacaaagggatacgataaatattttatagggtacacggttgggtggaaaccgtttttctgctcgtatattgtgacgtcactgggggcactgcatctctcgtgggaggcgtttgcaagcgccgtgtgcgatgttgtcaagtagtcgtgaaacaagagcaggatttggtttccacgaatcaccacttttcagtgaggctgagacaatttgaaaaaaatagtgttgttacccctgagtcgccgatctgaattcatcaaatcgatggctaaagcgtaaaaccgcgtatctacattgcggtgtttcaaaatttccgcctctattttatttttccgagaagaaataagtcaacttcatagcttgaaagttacacagagtattctgctaataaagaagaaaattcaaagaagttttctaaaacttacttagactatttttctaagggaaaataaaatataacaagaaatctgcaacgtcgcaaacggagatacatagtctcgcactttggtcatcgaatttacataggtcaaaattctgaatttagattttgatcaatcgccaaaaaatataccctagattataaagacaaaaatgtcagtcgagcaatttttgtcgagttagatcaaagttatagatttgagattttgtcgaaaatttctcatgtccttcagagtgattttttgcggtttcgttcaaatttatgtaaggccgtaaattagcaccaggatccggcaattctgtgcctgaatatggcagattagaattttaattagcctcctctcttaactacattttttgtcatgggaagttaaatcgccatgactagggttttttttttttttttttttttttttttttttaatccacaaatgtttgtgaaactcttctggtttaaggtatcaaaaacttcggatgaaatttttttgaactatgacctctttcctcgcgtatgcttacaaacctgatgaactagatctaaatttagcattaggtttcaataaagcacttaaatgctacaggaaaaagtctgcatccgagtcctgcaaaatctggctttaaaacaacctctcggagagttggttcgtggaatgaaacgtcatacaaattaaaaaccaacgcgtaattttatgatcaaatttatattattttcccatcatctttctaaacttttgaccaaaaaaaacattgaaaatttactacctaacttaaaatgcctttcaataagcaaactgccagtttaaatcacgcgaatgacgctgtgcaagatgattgagtgctcaattataagacggacaaaacagtgaatcactttttacgttttaattgatcactgccactacatcaagattgatgctgattgagaataatttacatgcagtgatctttaattttcaaagttgagtcctaatcgcaccgataaatgagccatcctgtatcttccagtttatgtactgtacggggtgtttcagtccaaccctaccaggcttttttcttggttgttctaagtcgcgcaaagtcaaggactaaggtgttaaaaagggaatccatcccaaagaataataagagtttcatggacccgagcccccccccccccccccccccccccnccacggcctcccgggggaggaggaggatgtcatgatcctagaattcggtgtccccgactgaagcgccattcaatggcattaaacttgaagagtacggaaaatttcacttaaattgacacctaaaaataaaaaatcggcccaccctaggcccaaaaatgaccccctaaagttggggtctgtgccctccgtagaatttacgcacatatttcaaccaaagagacatttgtgtgggaggcaatgcactcctcatttttgggtctagggtgagccgattttttattttcaagtgtcaatttaaagtggaattttccgtcggaaataccgacttttaggatcataacaccccccccccccccccccctggtaggaatggggtttcggaaccatgaaattcggattcctcgagttcaattccctcttccgaggtcactgacttcgggcgtcctataataacagagaacaaaacctggagcggggcacgggtggtttgagacaccctgtatatccaagttaaatttaccatatatgagtttatgttcatcacttgatgggtcatgcgccacttcaacacatctaacgtttcaattcgttcaaagagcacaaatgcccaccgaaacaaatcattctgtccacagcgtgatgccgatttgcagggtgcgcgcgactagtggactccccgctaatttgaaaaatggcgcgtcaatttgtatattttgccaagcgcggcaccgaattggcgggaaccaatgggtgtcgaggtttcgacttgtttacatttttgcattattctgataacaagttgtaaacaaacgtaagttcttcatcttctcgcgactgtggcaagtccaagatccatccatataggtcagtcattcccgaaacccaaatgagaatcttctgcgcatgacgtcagcattactgccgcgaaaaccagaaatgtcggaaacaatgcttttcttatgggagagaacaaatttttcttaatgaatcatttaaatttcttacttttaaattctttgaagctttctgagtgtcgaaaggaacgtttagaaattagcgtcaagggtttcaattcagctgaatttgcgtttttatatttttaaatgatttttgaagtcagcgatgtaacaagccatctagtggtatagattcgcgtgtaaaaatggctgatgcagagtaaactgtaaaaatgaaagaacacaaattcggcaaaatcgaaaccctgaatgctaatgtctaaacgttcttttcgacacacagaaagtttcaaaggatttaaaagtaaggaatttaaatgattcattaagaaaaatttgctctctcccataagaaaagcattgtttccgacattttctggttttcgcggcagtaatgctgacgtcacgagccaatggaaaggggcttaccccgagcggggaaatctgcgcaatgactgacctatatggatggatcttgggcaagtcctttgaatatttaaagttgcttcaggttcttgatttattgtataagtgcgaagtagtttttatttgcttttcttaaccgcgtctcttcaaagaatattcaattcgatgttccctcgttctatctcacaagtcaacgcctcaaggtgtgctctcaaagtatctgtaagttctcaccaatacctaaatcattgcttccttttcgcagtttcactagcactgtactcttcgaaattattgaggtttttaaattccaggaagcttcaaaccttccattgtggttcgtttatctaatttattgtttattcatcagcagggattcacttgtcatgttgtgtgggctacctactcaaaatccctttaaatatcagcgtcttaccagtttatttgtactctcagtcaccttaaagaaggttgccatagctgagagacggaatacctcttgcctagaaataagactgtggaaggtctgagtcaaattcagagtgtaatctattgagtagtgcctaggtattgggatgctgccatagtttgatcttcctacgataggaaatgcttcaaaatggttgatttcatgcctcaggtgttggagatttatacacgtccctcaaaaattgattacaaaatggtatgaaagcctcgtagctttggcattcattgctagaaaagaaaaacagaaaagttgatccgacgacagacaagcagaaaagactaaacgcatcagtgcaggctattagcattcacattgaacgtcaaaattgataagtctattgaagactgactattcttatgtgtagaaattttagtccaatcgactttcaaaataaaaaggctcaatgtaggtagatagcgcgtcaaaggaagcgatgaaaagaaaacggtatgtcggatgatgtcatacaacttgacccttcttgattgagaaatttacagggtgtttcagaccacccgtatgaggcttttttgtcacttatttataacttaagttaaatgcaagtaacgagccagcaagggctgtgaaaaatttgacactttccttcctttcattaagaaaataacttcagttcatacttacaggacactgaagtttttagtgacccccaagtattttttcatacgtgcaaaacctgattcaggtaactaggagttttgcttaccaaatcatgccatgtcaaattctatggttctattatgccgtgctgaagaaaaatgacgtatgagcctccattattgcctaattccctgtcagaaaatattcgtttttgaaggaaaatgcatatatttttcctcgaaattttcagacaccttaggtctaatcgcaaatgataagctctataaaattggacgaaaaatattcacaaattttttcggaaattcttaatttctcggaggaaatttggcagcgtgtaagggctcatacgacatttgttattagcacggcagaagtatcataagttaccgcgtacttttctgccatgctaaggaaaaaccccgcacaaacatccggatgttgccaaatttcactttataaaacatttatttcctaggaaatctacgaatatttctcctcaaaactttcagataccgtatattcaagtacgaattaaatgttctgaaaaaattagagaaagacatctacaatttgactaaaaaattcgcattttatgagaggaaatttggcagcttcccaaggctcttgcggcgttctttttaagcacggcagctctgccgtgataagaaaaaacgccgtataaacgttcggacgttaccaaatttcctccggcaaaattttaattttaaggagtatcatggatagctccacttgaaatgttcaaatagatctatttgcaagtaaaattctccgaaaaatttacagaaaaataatcataaatctccctaaaagttcttactctatcgaaggaaatttggcagcgtctgaaggctcatacggcgttttcccttagcatggcagagcattactttcgtggaccgtggactaaccgtgtagtattgatccgaagggaaatttttatccgtctggacaaatcttatttttctagttatttttcccccgataaacaggattcccggagaggaaattgaggattttagcgtgacagacggatagaaatgatccgttggagagtatggagaggcgccagcgtatcgagatggagcagcgtgcgcaaggcaacggcgcacagtggatcgagtcaagaggagaggtcggaaaaatttttgaaactttaaacgctcataactccgtttatataatactttgaggttctaaaagtggtttcatcggtttcctcgtggaaattttctccccgaaacactacctataattcaaaatgtgacgaaataaacatccaaattcgcagtttctgtcaaaagttttgtgtccgactctccaattgactcgatccggtgtgcggagcgcgtagcccgacagatagacaggagagtggattgacagaaatctcctcgactcgaacggagcaaaaaagggaatcacgagacgcggaggaggggggggcgagcggttcgggttcccgggcccgggacgtgagatcaccaaacgtgacagctccgaaaagttgagctcgcacaacaaacgacgttcgttttgggaaaaaataaaagttgtcgttgcggagacgaaactttagattaaggtggaaaagtttccggctgtcagtgaaaaattccagacagccagcgtgggacccgcggcggggcacagtggaaccacgaatcggagacggtccaagatgcgctctgccgcgctgagggaaaacgccgtatgagcattcgaatgttgcgaaattgcctttgagaaaatatttatttctgaagactgttgtgaatatttttcctccaaatttccagaaactttagatcaaatcacgaacaaaattcttcaaaaaattggatgaaaaaaagtttacaaatattcccgaaaattcgatatttctcgaaggagatgtagcaaagcctgagggctcatacggcttttttccttagcgcggcagtatttccttcaataaaacaacttttactcggagaattgtgaataattttcgtcggatttttccagaatattttgttcgcaatttaatctaaaatatctgaaaatttcaagaaaaaatgaccatatctctcctcaaaaatacaagttttatccggggaaatttgacaactctcgaatgtccacacgaagttcttccttaccacggtagtgctaagaaagaacgccttttaggggtttttggacgttgctaagcgtgatactaagatatttaatgtttcttgacgcgtgaattcaaatctcctgctcatgaaaacatacgtgagtctaatcgtaacctctatcttgacgctttggctcagctatagcaattttttacactttcaacggtgaagggtgggaaaggaacaatgctcgattgagaagcctgtcaaaactgttttgaggcgcgatttgactcaggtagagaattacgtttctcttggccgggcaattcaaaattcctgaccaatgtaaagtaaaaacattaatatcttagttaggagttgatttcagtgattttcgatacaagaatcgtgttccacgtgaaattttaacgaagaaacacgtatcagaatgcttacattcgtaccttgtctagtctgccgtgctaaggaagaacgccgtatgagcatttgacaggtgccaaattttccttggtaaaacatgtacttttgacgacaaacatgcatatattttcgggtattttagattaaattgcgtaaagaattgtctgtactttttggaaaaaaatattcacagttttctcagtaaattccgtttttacagaaggaaagttggcaacgtttgaaggttcatacggcgttcttccttagcaaggcagtctagtggtccattccgaaaaaaataacacatttcaagtttcgtcaaatttattcgggccttttgacatttcacgtcccatctctgcctcctttccctctgagcgggttgattattgaaattaatagacaaaactatagacatgggagacagaggaaaaatgaagatatcctattggttaaaatgggtggttggattggacaaaggaattaagtaatagacgaactaacggcaaccccagaggcggatccagcaatttggcaacgatagatttccttaatttaaacctatgctaaataatcggttccgtcggagcacctccccccccccctcaagaatcgatacatttccataggttgaaatggaggaaatccggtgttgccaagttaccggatccactgataggcaacccacgagagacccgacagttagtccgtcatttccttccaccctaagtctataagaaacatccgtctcaaccaataagatccctttgtactctctctgttttctttgtctatcgctttgtctatcaatttcaataatcagtccccggcgggccgattattgaaaatgatagacaaagctatagacaaagaagacatacggggtgtaaagcaatcctattagttgaaatgggtggttctcatagaccaagggggaaaatgatagactaactgtcgggtctctcgtgggttgccgttacttagtctattacctatacctcctgtgtccattgcaaccactcgcttctaccaataggatacctccaaatcatttttgtcttctttgcgtattgctttgtctatcaatttcaataatcagtcccctggtggatccaccgtgacggagttgcgataaaggcgggaaaagcgggcaagagggaacccgggcggggacggaatgggacgtgactggcggcggcgcggcggtgacgtggcgcgggtggcggcggcgaccggcgaacggcgacccacaaactgagttatctacaccggtgtcggtgctccccaactgccgcatccccctccgcgagcacccgcccctagccccccagccccggcccgtaagcctccaactcctccccaagtcccgaactcccgagcgagtgtgaattttcccaagccaacgggatatcgacggtgaaactaccaaaccacgtatctcgtttgcggtgtttaaaaatctacgctcgcattttatttttttgaagtagaccaaatcaatatcattccttgaaatttccacaaaattttctccgcacgaagaggaaaaagcacagaaattttcaagactggacgttaagtagtttttcgtttaaaaaataaagtatgacaggaagtctgcgacgtcgcaaaccgaggtacgtggtttggtagtttcaccgtcgatatagattttttccaagatacctcgtcgtaaaaaaacagctcatttggtatggtcatgttcggcgaatggcaagaggcaggttgtcgaagaaggtccttgattgggttcctcctgggaggaggcacagagggagcccgatgagaagttggagggaggggattgaagcagaaatgatgttaaggtgctcaatggcccaagggttgtggttcaaaagagggcagtggaggttaggtgtcggagagcgtgagggagtgctatactgcgacctgtactgccgtgctaaggaaaaacgccgtatgaaccttcaggcggtgccaaatttcctttgatgaaacgcgaattttttggtaaatttatgaatgttttcctcttaacttttttgataatttaagtcgcaattttaccgaaagattctgaaaatttaaagggaaaatattcatatctttcctaactcgaatgttcatacggcgttcttccttagcacggcagtgtatgtatgtatcacgccgaaagaaagaaagaaagaaagacagaaaaaaaattggcaatacgtcgtttcccacacgaaggaacgtagctccaatccaaggttgcaaaattcccaaaattcaattttttacgataataaacttgcgtattttcgtcggacattcatcggattttagcacgagcccataagaaaaattagtgacatttttagccggaaattctaaaaattatcatggtataagggcaatttgcgcgggaaaatttggaaacgtttttcgtgagagaaacgacgaacaggggtcgcgatcgctagctcgaaactgatgggaccggggatttctttcgaacagagctgttgcaagttccaggaattgccttgatcttcaatctttaaagaaaaaaaaatgtccgaacttttttaacagttttttaacctaaattaatgtaagtacatttcagattgcatgatgtatcatcatttttaatttttttaacccagatctaaggatgaactattaatgaacttcgaattaaacaccttaacaataatcatcgagttctttcaatcataatttaagagttgttaactggatcatcgaatttcaatcatgaagggatctaaaatcaaagcagttatctaatttagcgccattagtcgcacacattcaaccaaaatatattgtaagttcatctcaaattgcctgacttcctctcatattttatttttttattagagaatttgtgtacttaatgtctataaactttatgtaaattgttcctcaattatagataatatactcataaaattttaagccaaagtgttacctagttttctagaaataaaacttacgcgaagatcaggcaacgcctgatgcacatgggttgtttctggttaaaaccgtccagttatccgtgtttcaaacgatggggtctcgcggcaatgcaaataacgccttgatacaactattcgcactcgatggatgtccatattgcatatacgattaattgaaggagtttttgtcacggcgaattgacgcgaccggaacgtccttgggcttctgcagtcagtagccatgaagctcattctttatcataatacctgaacgcaactattcttccttgatagatgtttaatagggggcacgtcctctaatccctacgcagcccaacccctaaaaaccgcttcgcgccctctgaaagcccgcctcagcgagccccttatgagttaatcctgatagagcggacacatctaaggacaatacaaataaggggtattatttacattgcgataggatagatagagtttagccactgctaagctgccgtgatagcgaagagagcagtaagtacagaagtgaagttttgaagaaacgggctcagaagcttctgattggaaaattttattgaaagaagccttcgtactttgtcaaattgccactaatcgtccaaaagactcctaaaaatcgtttagatgagtaaaaatcgattggatttgaaaatgattttatttcaattacatgaaagggcattttacattttcatgctagattcttgttaggcgagacagccgcgtaagtgacattttctgcatgctttcgtggttgcgttttggacacccaacaaacacattttcaagttagaagttcgcagaaaaaggcggctttttacatgaaagcactcttttcattggctctgtggaggaatattgtcacttactgctgtcttgcctacaacaacgtcattttttgcgcacgtatggctttctcatatgtctcgttgtgatacaacaagatgaatttcgctgttttagcaatttcagtgatttcatctaaaagagttttgacgaattttgaaggaaactcgatttcaaaaattctacacttactgccttcttcgctataacggcagtaagttaagccggctgcagtgaccgtttattctcaatttcattcaacttgcagtttacttgttacaaaaaaaacctggaagtcaatcgatgaaaaagcaagccacggtctttcctttgcgcagacgcaaggcttgtctacttggcactttgcacttggctaatgccctttgcacatcaagacccgttctacgtcaccggtttatggcattttgtcacgcgtgacggcattgtctctgccagagtcaacgagctgtggaattcgaggaggttatctgcattgccagagtgtcccttgcaaagggttattaataattcactataacactgccgtgataaggaaaaacgctgtatgagcattcgaatgttgtcaaatttacctctcagaaaatattatattttgacaaaaagttatgaatatttttcccggaagttctcagactttttagattaaatcccggacaaaatcctctgaaaaattggaaaagaaatattcacatattttcctgaaaatccgtgatttatcgagggaaatttggcgttcttgcttagcacgacagaacagccgcagtataccctctttcagttattgtcagagcaagaattaaaagttgtagcaaatgtcattactataagtcctctgaccccctaatttttaattttttgtcacagttctttttaccgtgctgctgggtcgatttcaattctttttgcggctatcgacaggtgatggttcctattaaagcccgcagccggcttaatttagattttaggaatatgatccagttttctttctataaatttgtgatttttatcatttaaacaatgtagacattcattttttgactggaaaaaaacaactcttggatcctgagtctagactatgaaagaattcgacaagaaaaacattcgcttgattctcgcaaagttttgtttgaatcgcaaaccaagcctcttattaagtaaagcggagttctttttgattcaagcaaaaatccgattgaatcaagagtattttttcttgtcaattttttagagtttgaactctggatccaagagaccttttttcctgtgtgtcacaattctgctaaatacctaccgagttgattttcatgatttttgcaggtatcaataagaggtagtccctggtcccctggacaaacccgctcagtaatttagagtaacttacaggggcctgcgaaacgtcacctggagttgcaccgcgtagcggctaaggggtgtgccccctaattatcatatattgagtaagaattgttgcgtgtaggtgttatgaaagaccatgtgattcccttctcggctaccggccgcagagggctaagggcttcaagttgaatctccgtgacaacaacgccttcaattaattgtatatgcaatatggacatccgtcaagcacgaatagttgtatcaaggctttattggcactgccactctatttacattctcttgggggcttggggggggggggtctttgagggttcgaggcaccttgagccgcgtagaggccgtgaggcgtaccccttagcataatctaaattatgttcggtattgaaagtagaagaccctggaaccgtgagttgggctacattttgcaattacgaacaagaatgggcctgttgcaaacttttgctagagcaaaactaagagttgtttcttatagataatgactcaaaaatcacgatgagcgcatcggcaaactctgaaatgcactcataacttcacaatctgcataagaaatttgcggttttttgatcttcccgcttcaaaaacgatactacggcacaggtgaacattttgtaagaggagtcgttccatcgtcggcaataatcatcatagccgacgccaatccgccaaaacacgtttgatgggacgagataacacctgaactggattagaccagataacaatcggtgtgttaacgttcatattttccacgcccgaattgattgaccttgaactctccttgaattacgcgcggaactgcgtgcaagcgtcggccatgatgaatatcgccgacgatggagcgactcctctaacaaaatgttcacctatgccgtagtatcgtttttgaagcgggaagcttaaaaaaacgcaaatttcttacgcagattgtgaagttatgagtgcatttcagactttgccgatgcgctcatcgtgatttttgaggcattatctacaagaaacaactcttattattgctctagcaaaagtttgcaacaggcccatttctggctcatctgtgaaaacacttctaagcatagggaaatgaatgctacatactttgtttctaaattgaaccagaatttgtatctcctaattgcaaaatgtggtccagttggctgaaaaaactctttaaaggtggaacgggcgagagaggtgacctgactctaggggaggaaagggttacaaaatcggagagagtgctttgcgtcatctctgaaaaattttcagaataatatacgtgttcttgatgaaattcctttaagagagtgacctctaaatgtgatattcttaacttattcttgagcagctcattaccccaaaaccagcctctattagaaatgaagtaaatccaaattccggtaaacaggtaggattcttattcaaacaggtccaaaatagatatgacaggtttgcttaacgccaataaatttcaatttttcacctaaagtgacaaccatggctaataaacagacggatttatgatcaaaattagtcaaattacatcagacgtagtataattgtcaccgatggtttttttttcttttttttcaactgcaacctaacctaatcaatcttctgatcttaaattttgtgggtgtttaattttaagattcaagaaaaattcacagaaaattttaacacgtaatattgtttgttcccatgttgaaaaaatatcacttgagagaaaaataggcaacgtaaaatgaagtcaggctaattggtcccttgctaaatccagccaaattatctcatcaaaactgccgagctaaggaataacgccgcatgaataacatggatgttgctaaatttccccctatacaaacgttcattcttgggggaaattatgaatatttttctttaaaattttacgataatgtagtttaaatgtaaatcgacttctctgaaaaatcgggagacaaaaatttataaggttcgccctttgaagttcgtgtttcagcgaaggaaatttggtgacacctccaggcgcacgtacggcgtttttccctaacaaggcagaaaagctttggacatctcttggggcagaaacagggatttttcagcagaagtcactctgctgtgctaaggaaaaacaacacataaacatgcaagagttgccaaatttcctcccataaaatgtttatctctgagaaaaaacatgaatattttcccttgatattttcaggaacttcaggagaaattgcgagaaaaactatccgaaaaattggaagaaaattatttgtaaattcacccggaaattcgtgttgtattaaaggaaattttgcaacgcctgaaggctcgttcgacgttttttctcagcacggcagcattgcgcgaccatccgtaaagctcacggatcggtgcttggaaaaactagagtcctacgacatgctcttctctgaggctaagggcgcctcccccctctctgcccttctctccatcccctcatccctccgtccctccgcctagccgcatcctccctcgctgtatccttatgttttttcgagtcacaagttgcgacgagatgtggacttgagagttgaagcactgttcaatgctcaatgtttcccgagatctcgagcacgtcgttatctcgcaaactgctcggcgactaatgctcattgcacgtcaacacggatgccaccatgtccgtctaattcgggaggatgctatctgtgctgcggcccgattattgacattgatagacaaagccatagacaattaagatgaatgggatatagagggatcctgttggtggaagctagtggtagcacactggaaaaaaaaaacacattggatctagagtccagactcttgaaaacattgacaagaaaaaaggctcttgattcaagtagatttaagcttaaatcaaaaggaaatccgctcaaattaagaggcttggttcttgatttaagcttaaatcttattgaatcaagagtgttttttcttgtcgatatttttaagagtctggactctagatccaatgtttttttttttttttttttttttttttttcccagtgcaatgtacaaatgagacaggtaatgtactatctaacggcaacccacgggagaccctgtagttagtctatcattttctcccttagtctgcattgccttgccaaggaaagacacccaatgaaaatgtgaaggttgccagatttctcgtgataaaatttttactttcgaggaatgagaaaaaacactgagaaacggcccgaactgtatgtaacaaggtggagaaatggtgctgggtccacaccatttcgcggggaaaacaaagccaagaattatcaaaaacttctgggacttcttggctttgttttccccgcgaaacagtgtggacccagcagcatttctttcaaagaactttatgagtatctttccttgaagttttcagctacttcaaatttcatataaaattctctgaaaaatgggaagaaaaatatgcacaagtttcctcaaaaatatgtcttttatgaagggacatttggcaacgcttgaaggctcatacggcgtttttccgtaatgccgcaatcacacgctgaatgtgggagagctgaatgtggcttgacagtgtgtcatcggcccgatgccggaattttgagcgtgacgcgcaaaattcagcaacgattctcagcgaccatccgataatgtcggatttgtctgaactattcgaatagattttatacacatttggatgaaaataactcgaattagtgaaatttcatctgttgagcgctgactagtgactgccacattcagctgctaaattcagcgtgtgattgcggcatcacacacggtagaatatgaaccactcatttcaaccaatgggatcgattcatactttctaattcctctttgtctatagctttgtctaagaatttcaatactttgtcttacatacatttaaatcgaaagaaccagcgttgccagctctcaaaaatcgccactgttctgaagtaagggcgtatctccattttgacatgtgccccggaaatcgtagaattatacagaccgcaggcatcacgtagtgaatgagataccctcttacgtcagaggagcgatgctataggtaaattttggaatttgtttatatttccaccattctctacatgccatttttgtgtagaagatatacatacatatgctgtatagcttaataaattgtttaccttgtctagtgatctatcattcagtaacgtctttttccagtgaacattgacatttgtacgttgttgacaaattttcaaagtatgacccaaatttttcaacagcggccccatgaaggcgcgaattgctaagtgtcgagggtcgaggggagggtataaaagtcagatgaagaccttcaagttttcttgaaatgctaatgtcggcgaaaagtatacttgatttgaactatgaccttaaatgtgacacgcaggacgcatgtaacagcgctccgggcaaaaccccttcaatttttcgaatgcaacacgcacatccatggagctcgaatagttgtattcaagcgttgacattgaaatcgcgtggcattgcgttgtgcacgactttcttcggctgatctattaaggtgtacttttgtttctgattacaaaatgcacggtattaatcagaataaaaataacttcatcttaggttttattttctcatatgaacatcgagaaatgttctactttaaaatgttgtgcgtttactatttgacaaatcagcaacatttacaagaagtttctcaaagtaatgatgtttcgtttctaataaaaaaatgaaggaaaaaaaggaacatggaataaagtcacgaagaatgtagcgcaaaattcaagaaccgctgataactcgctatgaataaatcttacggaagaagaaagcagcggtgaaaggcatatactttatttatttttggccaaggaacctaacataaggtaacctcacccagctttctaacctaacctaaactaaactaatctttaatatcttagatcttgcagtctgataaaatcttacggatattttgcaaacgagcaacaaaataggatactcataattacgttttggataacctcctgattgttttcggctgaaattatctgatagcagatagaaacatcttctacctctctttaatgcataaaactcaatactgtgaaaaatcgaggtatactcacatggtttaatattttcctattcaaagtgtgattgacattgccttcatttcagtgagggtttgttccttttttctttcagaaaaaaaagaacattttttaatattgttgtcataagtaagtcatgtcagttgtctccacttgaaagttttaaaaactttactcaattaacgagagcaaaaaataaatgtgtcgtaaccttaaaagttcaaagttgaataatatcaaatccgggagcagattataccgctcttgcgtaattataattgatcgatagtaaagagtgacctttccgaaataatcatcacggcagaattcgtggttccccagacgtctcaacgttgcaaaattaccgcttgactttttctccgagaaaactgtctggcatttgaaccgcgttaagcagaaaggaaccaagccacatcagctattgccgaaattaactgggcaatttaattttttacaagaggacgttgttgcggattcttttgaaattttaagggatttgcttcgtccctgcaaaaaatttaatgaaattggcacaaaaatgtgcacagccgttttcatgtaaaaaattaaattcctcagtcaaactcgggaatagctgatgtggcttggttcttctctgcttaacgcgatccatttgtaactcgaaatgtaaccgatttttgaaatgtaactgattacgtgtaaaaatcaatacaatattggacgaaaactagtaatatttttctcaatttttttattttttaagtaaattttgcaagcttgttatggattcttggtcctctgtttggggaatcatgaattagattaggctaggttgatgacctctacaggcaagtagagctcttgcattcagtgaggattttcgctagttgaaaagtgtgcacttttttcactcagatggtgagattcgtggtaagttttagactttgctagtgcgcttatcgtgatctgtgagccattttcttcaagaatcaaatctggtttttgctctcactgtattttgcaacagactcactcatctacgagcaagttcgtgaagttctaattggtcattttcactgtcgaaatttcggggaaaattcagtgacaaaaagtggtaaggtttaatcgttgtgttcaatcatagtatacgagttatcacatcgttcaagccacttcaagttttactttttgcgtgcagcacgtttgtaacgaggtaatgatttgaacaggtcttaacttttgctgatttgttaacttcatgtgattgctaggcgtccgtaacaaaacatacattatttgaagtacacttccattagctgggtaattacgcttgctacatttttccatgctcagagtattattcattaaaaccgtaaaacccaccaattatacactattaattcccttactacggagacacagcctttgtaatttgtcaaaagtcttatctatttatgaaagtgaatttttctccttccaatagagtgtattgtgacatcctagtcatttattttattttaccattagggctgcataacgtttgcgcacacttttcttaccgataacgtttgcgcacgcttttcacgaatatcatttgcgcacactttttaccgataacgtttgcgcactttgcactatttggcaacgcttcaatgatgcgtcagtagtaatcgtgatagtaatcgtgatatcgcttcgtgataagataattcaacggacggataatttataaacggacgaggagaaattttcatagaaataaattccaataagcaatcaataagtaaatgaataaataagttaataagaagaaaatagaaaatgaagaaagttaagaaaataaggtatttggatttttcgctgttacttcagctaaaaatgctgtcactgtcttcaccggaatcatcttcagtgcaaggacgggttttagggctgtttttagggcaggttgcatttgaagagcaagtttcatcagcaccattttcagaaatggattcatcaggctcgtctgcattgaaagagtcatttacagcctccgggttattttcttcgtctgaatcatttttgtcggggtatttaacttcacgaaccatttccagaaattccgtaataatcaggtccttatcgagatacaaattggttaatccatctatggctgcgtcaatgtttttaggtatgggttttttaaactttttccgagatcgccaactcgcctgtaagagtgacagaatatctgaaaaggttaccttttcacaagatggaacctcctgccgtattattttaagtggcggttgatgaagattttcttccgcttttcccttcaaatttgttctaacttgctgcagttttatttgtttttcggtcggcgagtcatgtttctgtaaaggctaaattcaggttaaaatactttaaaacgcgatgttctgaccacggcgaacgaccgatgactgggtcactaattgccagacaatgcattgcaagaaaatgtcttatcatgaagcgatactatgaccgcccggatcaaaacaaactccggttttcgggtgacacgctcagcatcattgcagcgttgccaaatagtgcagtgtgcgcaaatgtcattcgtgaaaagtgtgcgcaaacgttatcggtaaaaaaattgtgcgcaaacgttatgcaccgaccattagcacggcatcattctcggaggccatcttgctgaagaacctgtgctatgtcgagcaagggtgacttgagcaactattcgtgcgacgggcagtgcaaattgtttacccagcggattgcaggcgttttgaaactgttgtcgattggcaactagacagacaggatagagtagagtagattagggtaagtccttgatttatcggtcgattttacactttctaacacgtgttcgtcttctgtgcgttttatataggattcatacctcgtaaaggtttaatcctctccttgttaagacccggttttatcacttttggttaagatccatcctctaactcaaatttacccgtaccggaaatcaatattttcagatcctaaatgccccctaggatcggatctaagtaagtatagttaagagacagctaaaacagcaaaattcatcctaatttaatgaaaacgagacgtatggaaaagccgtaagtgcataaaaaacgacatattttttttcaagacagccgaagaggttcatgagagccaatgaaagcagtgctttcaagaggaatgccgccctcatctgccgatttctaacctgataatgtgtttgttgtgcgtccaacacgctactacaaaagcacgcagaagatagcacgtactgctgtcttgccaaatactaacctagcatgaaactgaattttacctttttcgtgtactttaaaataaaatcggtcgagttttaatcccccaaatgaatccaaagagtctatcgaatgattggttgcgatttggcaaagaacggagacttctttcaataaaatgttccgctcagaataagcttctaggcccattttctcaaaacttctctcattttcattttccactttttgcacttactgctctcatcgctatcacggcagatccgcgattcctacgaggataagcgagatctggcaacgatacgcggtgctacttggttgtttttaattggtgtttctgcgacttgttcggcactctgccaatactcactcgactcactgactcactcgagttccttcttccggtgattttgattctcgacatgaagctcctattccgactaagctatcattacaacgctaattatgcgccacaattgccttgcaaactaatcgcgagtaatttcaaagagggcttcaaagccgggggtttcagctcgccgttattcacagctgagttatgagagcctccctcgactgtttctatggaaaaccccgattatataatatccgcgccgcgccgcctccgtttcctttgattccgattatattatttcatttttccagatgtcatccctcatttcgcttgcatattgactgccaaatggattgcgttttgctaaaaggagccaagagcatttcgatgttgctaggattgtgctacttacatcctgtgccaggaagtctacaagtccggaatttccggaaagtccggatgtattgctgattttttaagggcggtccggaagtactgaaaaagtgcggaattttgcgagaacgtcgggaatcttatttatttttgtcgcctttcgagcgagaatttcaaatttttgaaaattttcgaatttcgtcaattagaggtactgaaaaagtactaggaggtactgaatttcttgggaatggactggaaaagcactgtaaaagtactaatttttggcattttaaaacattacaaaattccacaaaatcaccccttccttatatttttaagaataatgtatcagcagcgcaagtattagcatcatatatcttgcattcatgcatatcttgcagcagcaggcgatttccatatcgtgacttccatctgacaattatttttcaaccattaccaccgccatcaactatgaccgcctgaaaaaatcacccaaatgaaaacaaatgtgtaaaagtattataaaaacacttttcagcacaaaattatcgcctttggacctacccccattgaatgagtcaatcttcctgttggctctgaggtgcataaatatacattcaaactagggatcatctaaaaatcagcttgttctttttgaaaagtactgcccccattaagctgacaaccgtgatttgttggacaaacaagagacgcaagcgtgaacacgcaaagtggaacaaactcgtggaatttattcaaatgcagccagtgctcctaatacaagcgaacagaaaataggaatcaagatcgatgtaagattagaagttgagtgtgcaggaaaaagtgatacctttgaaaattatgcggagtcacgcatagggttgaatttttgactgactgcggaaatgcatcgatatacatacagggtgtttcatggaaaagctcaccgttcgctcgcaccattgaatcatgggaaaatgctcttgaaagtggccgacgcagtgggcgaaaaggatagaaactaaactctccccattttcctactactttttttcctatttttttagctttttttctcctctcactctcatattgaagaccccagtacgccacgcacttacgcacgaaccacgtacctccattgcggtgtttcaaaatatccgctactatttcattttttcaaaaaaaagcaagccaattttaaagcttgaaatattcacagaaattctgccaaaagagaagcaaaatcgaggaaattttcgagaatttacatttactagtttcctaaaaaaaataaagtatgacaggaagtctccaatgtcacacacggagatacacggtttcgcactttagccatccatttttatcgtcttctcttcatatgattttctcattcttctccttcatttttcttatttttctccctttttattatatccttcctccgtttatctgttcttacgatctgtattccgttgcctcacccattccaaggataaggtcgaatgaacatgatttggattacattttgcaattaggaaccactatttctggcccattttagaaacaacacacatgccattggttttcctatgctggtatgtgcttttatgggagagccattgatagtgtttccttattgcaaaatgtaatccatttgtacccttcaatatcaattcaatgtattggtacctttgtagtctaattttaagctaattttaacttaagtatgtgcatttattttatgccgcatgtcagaaaatttaaatttttgaaataataaaagaagagaagagctaacaatacgaaagaaaaatatattggaatttctagaatcgacggcgggtgcgcaacataacattgcagagaggtggaactttaagtctgtaaacgttgggaaatgaaaaaggcgcagtaatgaagacttgaaactgcttcttacctagtaatataataaaatgcttgcacgtaaatatcttgaaaacaaaccgacagagaaactgcgccgctaggcgtgccaaaatgcctcctctttttctaagtctttccagccgagtatcatgaagaagagaaaacacttttattcaaaaatgttgaattgagatctgtcacggttccaacaatagattatccttctttcattttctactaaaatacccccccccccccccccccggaatccgttaggtttatttctagagtagcattctaaacacaacaggagagagaggaagatccgcccagagatacgggtctcccttatcactctctataaaactgccatcccagatcaagccctgaaagtttagtgccgctttatagaaattcgagatctcgctctggtgtcacgcctcgcgttatgaccatgacggcgtttcaataccgtccgggattttgcaggaggctaagccgccaaggcttacactgccgtgctaaggaaaaatgccgcatgaaccttcaggtgttgccaaatttccattgataaaacgcgaagtacctgacaatttacgaatattttcctcccagtttttcagataatttagttcgcaattttacccgaagattctgaaaattcaaaggaaaaatatccataattttcctaaaaaataaaaatgttaccgaaggaaatttggcaactctcgaatgttcatacggtgttcttccttagcacggtagtacagatgagtgtgatctacagatgaggtcggggaagactaaaaacgttatggatcgctcggcatgaccccacttagtattccaatgcatctgcctgatctggacgcgtcttcggcgcaccccctccccccctattcttgcactggtagtcattacagctcaaatttttcaatctaattgaaattttcggaatttttaggccttcatttccccgccaagtagtgtggaatcagctttattctaccaccctcagtggtgtggcgtgctttgcggtgtatcgattgatctgtcttttaaacttatggaaaaggatcgataaacaggatcaaggtgtcctcaattccagaaagtctggaagtagtactgattttttatgggcggtccggaagtaccgaaaaaattgcttgtgtaaaaagaaaagtcacttacatcaagcagaaaccagctttcattcaactattttattcttgattcagaatgaaattttcttgatggcatacttttaagaatgtttctgcctaaatctagtcacttttttctctaatgaaattcgaaaattatgctaaacgttattacatatagatgctagaacttagtgagtttttggaataccgctctctttttgtgcagtagtatctggatttattttgcgagaaaagctccgcactcataaccgatgcttgtcattcttaatatgttggagcgcctacaatttcgtttgatactgtgcaacacctctgttgtgaaatagttgcttgaggtgccgtggcacaatgcggcgcggcgggcggtcggccagcgcaaaaaacgcattcgcgcctacaaacctaacagggatacttcacgcattgcgcaatgcgtgaagtatccctgttaggtttgtaggcgccagttcgtggcgaagttccgaaattcctcaagagggcccggaatttttttcattttttcgtcgttttggtcgctatttgagcgtgaaatttaaattgttgaagtttttcgaatttcgtcaattggtggtactgaaaaagtactggatttttctattaagaagctacggaatttcttggcattgtaccgaaaaaatactgtaaaagtactgatatttgaccagcctgttttagtagacaccttgaggatgttcataacgaacactttgatcgattctttaccacagctccaaacggagaagtatcgataatcaatcatttacgcctcgccactgaaataaaatcattctcttcggagtggatgcgtaaaatctcacatttatttgaaaatagagtgacacggcaacacggcacggcgctgtccgggaaagggtccgagctcactatcgaggggagatagaaacaaaggggatggaaaaaaagggttggaaaaggtcaaagagccggtgccggtgcgttaattaatgtggctaaaaagcagatgcactcctaactaacctcatgcgctcagctgaactttcctctttgattcgagttcttaattagttagataagctttgtacttttaactttaaataatcatccgacgaacaaaagttgcttattgtttaagcttttgatttccgcaattaggcaacgaagtcaaaagttcgtaatgcaaaaaaggctaatttcacttcggagccttactcgaatcaattgagtcatagatgaacttggaatgtttgaatgctgcattttgagtggataaactaagattcgagcctgaaagtcaaaattaagggctggcacatcaccgttcaacaacaactattcacgtattgctatccgggtagaatgacccaagtttaggtctgtaacaccaaaaattcataggaaagatccagaaactttttgtcttttttcatttttttttcaaacaaaagaaatattccggtcagaaattgagcaaatgcctttacgcaagttttaggagcgctactttccacggaaaggagcgctaggggttgtcccctgtgattgtggtgctaccccaatttgttgaatgatatggacattttcaattaattttggcagtgccacaactcaattggacgtatttatgtcaaaatgaaccatgtgcatggggtttgcgtgagaaatagttccttttagcattaatagtacaatttggggaaatgccgtaacatttgtactagtaacctaatttattgggacactaacataattaattggaaatgtctatatcatccgacaaacctcacctctttttttccatgtgggtcacttgaaaagaaacatttaaatgttcgctcacttcaaactcgagcaacgataaccactatttatcgtcacctcccggccgaagtatcacaagcgccatgcgacgtttcaaaatttctgccgccattttattttttacagggaaattattcgttgaatctgttcgaaaatttcactaaattttatcaacagcacaaaagaaattcagtgaaattttcggtcagcttcgttgagcaaaatggtggcggaaattttgaaacgtcacatggcgcttgtgcactttggctgggaggtgttgttatatctaaagtgtttacaaaatctcaattcaagtcattaaatcattaacaattaagaatatagtgtaaattatcatacgttatctgtgtttgaacgggagtgcccccttaaaatttgattatttcctggcgaagggcccttcgaacatcctcctcttctccttaacgagcacccttactgagctcccacattcattctccgggaacgtagattcgtaaaaggtgccccattgagcccagcacggggacgatatgtttatacagccgtaattgtgactctcagacccggagcggtttttgagtgtataggaggaaaccttcagcaatgtttgcctatgaaaaaagctttcctcggcgggacgtaaaaaaaagctactttctcgcggaaaacgatgaggtgatccgccctgttaacattaacattagaatgttgccgacaatttcctgataatgctagaattctaaataaattgtaaatttccattaaaaattttaatcgcatttgcaatttaatcttgcgtgaaaatatggaccgagttcatcagaaaggaactaacccacattaagttgaaactgagaaaaagaggtttgaagttttattcccgcataaggttcagcgtagaaaataaactttaacctctcttttcacaaatttatttcttttttttcgactttaggattttggcaggagaaaataaacgacaagaggaactcaaaaacatctaaactcaattttttttaaaaatgtgggttggtttctttctgataaactcggtccatatagactttgccttgaaattttaagggataggagactaagattcaatttaggtcgaacaataaagctttaagttttcaacgggaaacactcccttatattacaataactgagttgtagtttgagttgagcggtccaattcatttaaatagccaatagattaagcaaaatgtttgttttaaatcaacaaatttgaggttcgagcgtgataaattgaaactgcaaatagctgttgctcaaaactacgtttttgagaaagcaagctgtaaaccctcacactaccgtgctgaggaagaatgccgtttgaggattctaatattgccaaactcctaacaaaatatttatttttactgaaagttttgcatactctcccttgaaattttcaaatgtatttgattaacttgtaaaaaaaattgcccgaagaaatggaggaaaaatattcagaatttctccagtaaatttgcttttttttttttattgaaggaaatactgcgttttccttagcacagcagtacagtccctatttgatgtgacctttatttggattttttgtgtaaacattttcatgaagcgttcctttgaggtgtgtaaaaaatcttgaaattgaatctgtgaattcctaatgtgtctaatatatttcacgtaaattttctacaaagaagcataaatcagcatcaactgtatgttaatttcgtacactgtttgatggtccactgctcaatttagagttcttcggtaccgaggaccctacctctcgtgaacggtaataacttcacaactttttatcagggaggttttgcaacgtgtaaatcagggttgccacagtcagggaaaacctggaaatgtcagggaattttaaaaagttagggaaaatgatgaaaatgacgaaaatgtcagggaaaatttgttaaatccccgtcatttgctttctaaaatgggttcgagcttttgaacaagaaatttgcccgagaactattttcaataatgccttcttaaccatccgtcacatcttcaattgtcaaggaatttcaccaaaatgtgtcagggaaatcagggaaatgtcagggtattgcattacctaaattctgcggcaaccctggtaaacgaacgtaggctgatactccttaggccagcagtaacaaggtgcacaggttgagtagccgagagagggagtttccaagtcagatgaagggagctggaaagtggcgcggtctcctcggccgcagaaatgagtcacggagtgggtgaacataaaaattaagttggcacattaatataaaatgacagttttagcgtaactgggtcattatccgtcgcgagggtctacgaggtggcaaggagaagaagctttcgcttacggcgttctgccccgctcttaatcgcacactccgtcgccacgctcgagtaaggacgtaaagaaactccggggtgaaccctattttccgtatgatttaacgcgctccaaggctcacgtagaatcgggcctgggtcagaggaatgacgacttttcgacctctgcagtgcgggatgtacggtgaaattgtgacgttatagtttcatgtcgcgcctcctgatcgtttttatcagtggcgaggggtgaatgtatcgattatcgatatttccccatttgaagctatggtaaaaaatcgattattaaggtgttcgctgcgaaaaccctgattttcgatccttttccgcaggtttaaatggtagatcaatcgatatatcgcaaagcacgccacgccactggtttttataggaagcggaggactttgatggtcagggattttcccattaagggacgttatcaatttttttatgggctgtttttagacagatcggaaggagaactgcaccgggttatcgtggcggccttttgccgcctctcagaattgctagccgaatggagttctttacctacttataacccatagcttccgaaggctgtaaatgctttaacgacatgaatggagctgatagtctacatttgaattagagcgggggaaaagaggtgggggctaagacgcaacttggttatttccgattattatggtagtgaccccaataaatcaggttactaaccgaaatgttgtggtactaccacaattggacgtatttaagcaaaacgaaattatgtgcattaggacatgaaccctgagacccataagaatatatgcatatgatagggctcacgtcataatgcacatagttctgtttggcagaaatacgttcaatcaatttaacatgcccatagcttctagcaaattggggtggtgccgttattttaaggaacaacccccaacactttgttccctgaagtttacgggattcgtgttggtttcttcacataaaagtagagtgtaaaagaaattttagaaatttaacggtgtgagatatttaaaaaaatattaagaaataatttatgaatttgaaggaaagaataaatttctcaatgcagcaagaaaaattcggatgtctctatcggagcgtgtggtcaagccacttgctaatcggtgactcaaatatttttgctcacctggccaattcaaaaatcgacggaatgtttgctagagaaaatcacacaaaaacactggaaaaaagtcttctatggtgtatatttagagtcgaggctcttaaaaaatttgacacgagaaaatacactagattcaaccggactattgcttgaatcaaaaggaaatccacgaagattaagaggcttggcaatcgattcaagcaaatcctaatgaatttaaagtattttttattgtcacattttcttagagtctggaccctggatctttagactttttttccagtaaaattatttttcctatagtcttatgaatctttctgactctttaagtgtgactttagagtctttaaaaaaaaacgacacttcagtctcatgtaaatggatcgctttaaccaaaatcagcctaactaaaagtattcaaaatttcgacttgaaatttgcaagcacattttttacaagccaacgataaagtgtaaaattcaccggaaaaaaacacattggatctagagtccagactcttgaaaacattgacaagaaaaaggactcttgattgaatcagatttaagcttaaatcaaaaggaaatccgctcaaattaaaaggcttggttcttgatttaagcttaaatctgattgaatcaagagtattttttcttgtcgatgtttttaagagtttggactctagatccaatgtgttttttttttttttcagtgttttcaagacgtcgcgttgttcggtaagaaaccgggattcgagaggaaattcgacaacgtggacacggaaacttggcaactctcgaatggattacattttgcaataaggaaccactatttctggctcgttttagaaacaacatacatgtcattgatttccgcatgcatatacgtgctttatggaagagccagagaaagtggttccctattgcaaaatgtaatccgaatgttcatacggcgtttttccgtagcacggcggaacgggaagacaccgagacggtgaaattcctttttacaaggagccgaaattactttccattcttaaaagattggaaacaaattgagtggctgccgcctggtaggaatggagataaagcggagtccgggcacccaatttatctgacttctcctgcctcggcgcgggtccttattccgtactttggcgcgctcttgttttcctctctctctttttttttcctctctctctttttatgcctccctcaaattacatccttttgtgtgtcaagagcccctactcgaaaaagccagtcgaccgggccgagcccgcgaaattttacggtcacctcgtcaaattctgcaagcctgcctctcagccgtccgcgcgggttgacgtgagtgtttgctccgatgcatctcctcgacgtgttatttctctcgcaataattctgccgtgctaaggaagaacgccgtatgaacattcgagagttgccaaatttcctccgataaaatgttcatttctgaggaatgttttgaatatttttacttgaaattttcaggaactttagatgaaattgcgaacaaaattatctataaagttggaaggaaaatctatatatttacactgaaaaaaaagtagttagcgttgagaactaatttggtaagttctcgccaagtagaatcaaaattaggcttcagaactaatttattgtactgaagcaccaatcaattcgcttcatacgctgacttgactttactagagcgcgaaccagaattggaaaacagcactagctgtaaaattagcgctgtggtaannnnnnnnnnnnnnnnnnnnnnnnnnnnnnnnnnnnnnnnnnnnnnnnnnnnnnnnnnnnnnnnnnnnnnnnnnnnnnnnnnnnnnnnnnnnnnnnnnnnnnnnnnnnnnnnnnnnnnnnnnnnnnnnnnnnnnnnnnnnnnnnnnnnnnnnnnnnnnnnnnnnnnnnnnnnnnnnnnnnnnnnnnnnnnnnnnnnnnnnnnnnnnnnnnnnnnnnnnnnnnnnnnnnnnnnnnnnnnnnnnnnnnnnnnnnnnnnnnnnnnnnnnnnnnnnnnnnnnnnnnnnnnnnnnnnnnnnnnnnnnnnnnnnnnnnnnnnnnnnnnnnnnnnnnnnnnnnnnnnnnnnnnnnnnnnnnnnnnnnnnnnnnnnnnnnnnnnnnnnnnnnnnnnnnnnnnnnnnnnnnnnnnnnnnnnnnnnnnnnnnnnnnnnnnnnnnnnnnnnnnnnnnnnnnnnnnnnnnnnnnnnnnnnnnnnnnnnnnnnnnnnnnnnnnnnnnnnnnnnnnnnnnnnnnnnnnnnnnnnnnnnnnnnnnnnnnnnnnnnnnnnnnnnnnnnnnnnnnnnnnnnnnnnnnnnnnnnnnnnnnnnnnnnnnnnnnnnnnnnnnnnnnnnnnnnnnnnnnnnnnnnnnnnnnnnnnnnnnnnnnnnnnnnnnnnnnnnnnnnnnnnnnnnnnnnnnnnnnnnnnnnnnnnnnnnnnnnnnnnnnnnnnnnnnnnnnnnnnnnnnnnnnnnnnnnnnnnnnnnnnnnnnnnnnnnnnnnnnnnnnnnnnnnnnnnnnnnnnnnnnnnnnnnnnnnnnnnnnnnnnnnnnnnnnnnnnnnnnnnnnnnnnnnnnnnnnnnnnnnnnnnnnnnnnnnnnnnnnnnnnnnnnnnnnnnnnnnnnnnnnnnnnnnnnnnnnnnnnnnnnnnnnnnnnnnnnnnnnnnnnnnnnnnnnnnnnnnnnnnnnnnnnnnnnnnnnnnnnnnnnnnnnnnnnnnnnnnnnnnnnnnnnnnnnnnnnnnnnnnnnnnnnnnnnnnnnnnnnnnnnnnnnnnnnnnnnnnnnnnnnnnnnnnnnnnnnnnnnnnnnnnnnnnnnnnnnnnnnnnnnnnnnnnnnnnnnnnnnnnnnnnnnnnnnnnnnnnnnnnnnnnnnnnnnnnnnnnnnnnnnnnnnnnnnnnnnnnnnnnnnnnnnnnnnnnnnnnnnnnnnnnnnnnnnnnnnnnnnnnnnnnnnnnnnnnnnnnnnnnnnnnnnnnnnnnnnnnnnnnnnnnnnnnnnnnnnnnnnnnnnnnnnnnnnnnnnnnnnnnnnnnnnnnnnnnnnnnnnnnnnnnnnnnnnnnnnnnnnnnnnnnnnnnnnnnnnnnnnnnnnnnnnnnnnnnnnnnnnnnnnnnnnnnnnnnnnnnnnnnnnnnnnnnnnnnnnnnnnnnnnnnnnnnnnnnnnnnnnnnnnnnnnnnnnnnnnnnnnnnnnnnnnnnnnnnnnnnnnnnnnnnnnnnnnnnnnnnnnnnnnnnnnnnnnnnnnnnnnnnnnnnnnnnnnnnnnnnnnnnnnnnnnnnnnnnnnnnnnnnnnnnnnnnnnnnnnnnnnnnnnnnnnnnnnnnnnnnnnnnnnnnnnnnnnnnnnnnnnnnnnnnnnnnnnnnnnnnnnnnnnnnnnnnnnnnnnnnnnnnnnnnnnnnnnnnnnnnnnnnnnnnnnnnnnnnnnnnnnnnnnnnnnnnnnnnnnnnnnnnnnnnnnnnnnnnnnnnnnnnnnnnnnnnnnnnnnnnnnnnnnnnnnnnnnnnnnnnnnnnnnnnnnnnnnnnnnnnnnnnnnnnnnnnnnnnnnnnnnnnnnnnnnnnnnnnnnnnnnnnnnnnnnnnnnnnnnnnnnnnnnnnnnnnnnnnnnnnnnnnnnnnnnnnnnnnnnnnnnnnnnnnnnnnnnnnnnnnnnnnnnnnnnnnnnnnnnnnnnnnnnnnnnnnnnnnnnnnnnnnnnnnnnnnnnnnnnnnnnnnnnnnnnnnnnnnnnnnnnnnnnnnnnnnnnnnnnnnnnnnnnnnnnnnnnnnnnnnnnnnnnnnnnnnnnnnnnnnnnnnnnnnnnnnnnnnnnnnnnnnnnnnnnnnnnnnnnnnnnnnnnnnnnnnnnnnnnnnnnnnnnnnnnnnnnnnnnnnnnnnnnnnnnnnnnnnnnnnnnnnnnnnnnnnnnnnnnnnnnnnnnnnnnnnnnnnnnnnnnnnnnnnnnnnnnnnnnnnnnnnnnnnnnnnnnnnnnnnnnnnnnnnnnnnnnnnnnnnnnnnnnnnnnnnnnnnnnnnnnnnnnnnnnnnnnnnnnnnnnnnnnnnnnnnnnnnnnnnnnnnnnnnnnnnnnnnnnnnnnnnnnnnnnnnnnnnnnnnnnnnnnnnnnnnnnnnnnnnnnnnnnnnnnnnnnnnnnnnnnnnnnnnnnnnnnnnnnnnnnnnnnnnnnnnnnnnnnnnnnnnnnnnnnnnnnnnnnnnnnnnnnnnnnnnnnnnnnnnnnnnnnnnnnnnnnnnnnnnnnnnnnnnnnnnnnnnnnnnnnnnnnnnnnnnnnnnnnnnnnnnnnnnnnnnnnnnnnnnnnnnnnnnnnnnnnnnnnnnnnnnnnnnnnnnnnnnnnnnnnnnnnnnnnnnnnnnnnnnnnnnnnnnnnnnnnnnnnnnnnnnnnnnnnnnnnnnnnnnnnnnnnnnnnnnnnnnnnnnnnnnnnnnnnnnnnnnnnnnnnnnnnnnnnnnnnnnnnnnnnnnnnnnnnnnnnnnnnnnnnnnnnnnnnnnnnnnnnnnnnnnnnnnnnnnnnnnnnnnnnnnnnnnnnnnnnnnnnnnnnnnnnnnnnnnnnnnnnnnnnnnnnnnnnnnnnnnnnnnnnnnnnnnnnnnnnnnnnnnnnnnnnnnnnnnnnnnnnnnnnnnnnnnnnnnnnnnnnnnnnnnnnnnnnnnnnnnnnnnnnnnnnnnnnnnnnnnnnnnnnnnnnnnnnnnnnnnnnnnnnnnnnnnnnnnnnnnnnnnnnnnnnnnnnnnnnnnnnnnnnnnnnnnnnnnnnnnnnnnnnnnnnnnnnnnnnnnnnnnnnnnnnnnnnnnnnnnnnnnnnnnnnnnnnnnnnnnnnnnnnnnnnnnnnnnnnnnnnnnnnnnnnnnnnnnnnnnnnnnnnnnnnnnnnnnnnnnnnnnnnnnnnnnnnnnnnnnnnnnnnnnnnnnnnnnnnnnnnnnnnnnnnnnnnnnnnnnnnnnnnnnnnnnnnnnnnnnnnnnnnnnnnnnnnnnnnnnnnnnnnnnnnnnnnnnnnnnnnnnnnnnnnnnnnnnnnnnnnnnnnnnnnnnnnnnnnnnnnnnnnnnnnnnnnnnnnnnnnnnnnnnnnnnnnnnnnnnnnnnnnnnnnnnnnnnnnnnnnnnnnnnnnnnnnnnnnnnnnnnnnnnnnnnnnnnnnnnnnnnnnnnnnnnnnnnnnnnnnnnnnnnnnnnnnnnnnnnnnnnnnnnnnnnnnnnnnnnnnnnnnnnnnnnnnnnnnnnnnnnnnnnnnnnnnnnnnnnnnnnnnnnnnnnnnnnnnnnnnnnnnnnnnnnnnnnnnnnnnnnnnnnnnnnnnnnnnnnnnnnnnnnnnnnnnnnnnnnnnnnnnnnnnnnnnnnnnnnnnnnnnnnnnnnnnnnnnnnnnnnnnnnnnnnnnnnnnnnnnnnnnnnnnnnnnnnnnnnnnnnnnnnnnnnnnnnnnnnnnnnnnnnnnnnnnnnnnnnnnnnnnnnnnnnnnnnnnnnnnnnnnnnnnnnnnnnnnnnnnnnnnnnnnnnnnnnnnnnnnnnnnnnnnnnnnnnnnnnnnnnnnnnnnnnnnnnnnnnnnnnnnnnnnnnnnnnnnnnnnnnnnnnnnnnnnnnnnnnnnnnnnnnnnnnnnnnnnnnnnnnnnnnnnnnnnnnnnnnnnnnnnnnnnnnnnnnnnnnnnnnnnnnnnnnnnnnnnnnnnnnnnnnnnnnnnnnnnnnnnnnnnnnnnnnnnnnnnnnnnnnnnnnnnnnnnnnnnnnnnnnnnnnnnnnnnnnnnnnnnnnnnnnnnnnnnnnnnnnnnnnnnnnnnnnnnnnnnnnnnnnnnnnnnnnnnnnnnnnnnnnnnnnnnnnnnnnnnnnnnnnnnnnnnnnnnnnnnnnnnnnnnnnnnnnnnnnnnnnnnnnnnnnnnnnnnnnnnnnnnnnnnnnnnnnnnnnnnnnnnnnnnnnnnnnnnnnnnnnnnnnnnnnnnnnnnnnnnnnnnnnnnnnnnnnnnnnnnnnnnnnnnnnnnnnnnnnnnnnnnnnnnnnnnnnnnnnnnnnnnnnnnnnnnnnnnnnnnnnnnnnnnnnnnnnnnnnnnnnnnnnnnnnnnnnnnnnnnnnnnnnnnnnnnnnnnnnnnnnnnnnnnnnnnnnnnnnnnnnnnnnnnnnnnnnnnnnnnnnnnnnnnnnnnnnnnnnnnnnnnnnnnnnnnnnnnnnnnnnnnnnnnnnnnnnnnnnnnnnnnnnnnnnnnnnnnnnnnnnnnnnnnnnnnnnnnnnnnnnnnnnnnnnnnnnnnnnnnnnnnnnnnnnnnnnnnnnnnnnnnnnnnnnnnnnnnnnnnnnnnnnnnnnnnnnnnnnnnnnnnnnnnnnnnnnnnnnnnnnnnnnnnnnnnnnnnnnnnnnnnnnnnnnnnnnnnnnnnnnnnnnnnnnnnnnnnnnnnnnnnnnnnnnnnnnnnnnnnnnnnnnnnnnnnnnnnnnnnnnnnnnnnnnnnnnnnnnnnnnnnnnnnnnnnnnnnnnnnnnnnnnnnnnnnnnnnnnnnnnnnnnnnnnnnnnnnnnnnnnnnnnnnnnnnnnnnnnnnnnnnnnnnnnnnnnnnnnnnnnnnnnnnnnnnnnnnnnnnnnnnnnnnnnnnnnnnnnnnnnnnnnnnnnnnnnnnnnnnnnnnnnnnnnnnnnnnnnnnnnnnnnnnnnnnnnnnnnnnnnnnnnnnnnnnnnnnnnnnnnnnnnnnnnnnnnnnnnnnnnnnnnnnnnnnnnnnnnnnnnnnnnnnnnnnnnnnnnnnnnnnngaatttttgatcaatcaaatctttgttttttccagaaaagaagctaaaaatcctggaggggtcacctctacaagtcattttcaaaacactgtaacttggtcattttttgacttaaagagctcagatttgtcttgttttattggtaattgctcggtctttaagactacacaaaccgtattttgatatctgctaccgtttgtccaaaaaaaaacaaaacaatcaactctttgttttttccagaaaagaacctgaaaattccgtaggggtcccctctacaagtcattttcaaaacgctgtaacttgatcaatttttgacttagagagctcggatttgtcttattttatcggtaattggccggtctttaagactacacaaaccgcattttgatatctactaccgttcgtcaataagaaaaaaacgtgcagtacttttgggacaacctatgtaatatgactatatttttcgcatttgaccatcgccatcttttaaaagatgcgtactcaaatggagccttcgctgacagtccagaaaatataagcaacgtgaggtcaaaaatgaaccgcaaagtggtccacaagtgagacggatattgaacagttgaatttattcatggatcgctttcatttgaccgtaaaacctgacaagttcaagtatgacttgccttaaattgatcgtgttggcaaaatgagatcccgcatatctgagtattaatatcagtatcgatgaaagcttcattaatttcgtcttgggatttttgcgtgaaatcctgctctgtaaaactttgcttcttcgctctatgagatttttttttacaatttttttaatttaattttatcgcagctttgatacgcttttaaataaagttagtcgagaggaaaaaagaaaacatttccgtgtttcttgatgtatctcatttttttccttaatggtaccaaatacggtgatttccacattgaaaaaactgaattattctgcatagttatgtaactgacattttcacataataacagtccagtagcaacgttatgaggctattcttttacgcaatatttaacattcaaattcagcgtcgtgaacattacgtattaagtccatcgtcggaaatggcgtatctgctttatgtcatttcaacgctgaaacatactctcagtaataaagcgaggagaggagagcttttgcaaaacatatgccatagactaaaattcaagttttccaaattgttaacgcaaacaattctctcaaaaatattatccgctcagcaagccaaagaagtgtaatagatcgataggcggaaggtttttaaaaatcggggaaaggaggaagagaaacataaaatggggaagagtaagaagatgaagaagtttaagagaaagaggataaagaggagaacgaataaaaaaggaaatgaagagctagagtataagaagaggagaacttaaactcagaagttcaaatgaaatcagcaacccaaaaatcataagatccattaccttttaatatggtacatagcattttctgataaagttccgttaaatccagtatgtggaccatagtgcggcgtgctgccagcgcgacacgcgcactggcgcctacaaacctaacagggatacttcacgcattgcgcaatgcgtgaagtatccctgttaggtttgtaggcgtcagtgcgcgtggcgcggtgttcgccctcgcccgcagcgccgctgtgcttcaaggaactattttgcaacagagtgtttcacagtatcttacgaaattgaaggctcccccgtatcaagaatgacaggcatcccataagagtagggaaccttcatcgcaaaataaatcaagacactacggcgcggcataaaaagagagtggaagttcaaaaactcacaatttttagtatccgtatttaataacgtttagcataatttttgaattttattagagaaaaatgtgattcgagttgagcagaaacattcttcagtatgccgtcaaggagattttattatgaatcgagaataaatgattaaatgaataaatggtttgaaatagttttcaggcaaaatttgtcgttcaaaacgtcaaactcattctaaaaagaaaataaaagtgacgtacagagtttcccgtgacatgttcgtctttttccctgacatttttgtcatttcccctgacattttcgtcattttccccaacagattcaggttgttcctaacttttttttaaattccctgacgtttcccagttttcccaaagtttcctgactgtggcaaccccgtaaagggatacggaggattaacggaagctggcttttgtaatggacgaagaaagtaggcaatagattaactaacggcaaaccacgagggaccctttagtaggccgtcatttccccccttagtctgctctgctggaaccacacatttcaaccagtaggattgccttatactccttatatcttctttgtctatcaatatgcgaattcaaacgtaaagcgaatggaccacacggcaggagccgaaattactgcgaaaagcgtcgaagttgtgtatactaaggacgcattaaagcttttccaaccagtgagactgctccattttccctttttcgtacactgaaaaaaaacaacacattggatctagaatccagactcttaaaatcatcgacaagaaaaaatactcttgattcaatcagatttaagcttaaagcaagaaccaagcctcttaatttgagcggatttccttttgatttaagcttaaatctgattgaatcaagagtcctttttcttgtctatgttttcaagagtctggactctagatccaaagtgtttttttctttttttttccaatgtataagtctatcggtatgtctatcaattttaataatcagccctccgacaaagataaatctcggaacagaacgccgcgagtgaggcgtcgagcggaaaacctccaaacttggcaactcggatgcaccccgaagaagaaaaagcgctggaatgcgacgggggaggcgcgaagaggggtgaaacacgcagcggggtgagcggtcggaaaaacgagggggcgaagatggggggggggggacgcgctgcacggcggcgcagcagcgcccggagtgcgaggaaacgcgcgtccctgcggcggcctctgttgactcgcaaaagcaaagggatgaaaagggcgcgggagggatgacagtttagccctttccgcgaggtaaactcaaatagtgcgtcaagtgacttttgaattgaattatatcaacatttgacactctcaaacttgcacgccccccgcgcccgcgttgagactcatttcgtcccctccgctggcgaggctggtgactcctttcatccctgcccgacgaccacagcgacggtgacagcgctatgcggcgtgcatcctatttagtttaaagctattgttgcacccttaacgcgcgctccctcccgtccccttccgccccccccgccgtctcgagctcctgcgtctttcgtatcaacgtcacgcctgtcccccgcgtgctccccccccccctccttccccactgacagccaggtgccaggtctctttatccgtggtgaaagtcgggaaacgagcacctcgaatgaaatagttcaaaatctccgctgggttttttttcttttctttctttccttttttttttttttggaaagaggcaccgattaagagtgccctcgaaatattctgaaaatgttcaagttcaacgctagatgaaaattaaaagttccgtaagaattcaaaggaaagcgtttcccgaagtcctctttgaaaatatgaaatgtggcaaatccacaacgtcgcaaatcgagttcgacccaacagcatttttctacaattttgcggatactcgggtctaaaatcgctgatgttgcattgctcaagcacactgaaaaaaaaaggcgtactatttttaagtaaacgcgttgtcgcggattttttactaattcgaaggcgggtccgccctggaagaaaacaccgggtttctcaatgtaggcattcgcggaaatgcaaataacgctttgatacaactatacgtactcgatggatgtccatattgcatatacaactaattgaaggtgtttttgtatcggtgaattgatgagcagccttcttcccttaactaactctctgcagccgagagttaggaagctcattgtttgttataacacctgaacgcacctattcctgctcaaaggatgtttactagggggcgcgccccctgaccgctaagcagcctcagtgaaaatatcttaatttcttttttcatttaaagagataccgataaagagtgccctcgaaatattctgaaaatgttcaagttctacgcaagatgaaaataaaagttcagtaagaattcaaaggaaagagtttctcgaagtcctctttgaaaatataaaatgtggcgaatctacaacttcgcaaatcgagcgagactcaacagcattactctacaattttggggatgctccgctgtaaaatcgccaatgtcaaattttttaagcagtgaaaatatcttagtttcgacccagcgggctgattattgaaatttatagtcaaaccgatatacaaaaacgaaaagggaaaaatgaattggaaatttggcagcattgcaattgtgatacgttctttcttgagagaaactgcgatttatactttccgcacattcacagctgcaatctgactgatatttttttttaaataaaagctattcggccgccaacgcatacactgccgtgctaagaaaaaacgccgtatgaacattcgagagttgccaaattcccttgataaaacatgtatctatgacaacattcaagcatatttttccttgaaatttcctggtattataaatggaattgcggacaaaattgtctgaaatttttggaaaataattttcgcaattttcccagtaaattcggtttttattggaggaaacttggcaacgtctgaaggcccatacggcgttcttccttagcacggcagcacagccagcttcaacaacctcgaacatacgctcgacgaattttaaacgagatacttgacgctgaaaaattaaacggtctcccaactctgaatacaggtttagggaagagggagcttcgcagaaatcctaaacattcacccttccatcactttcattgagagatatctcacgtccatctctccgtcagtagcggcgtgctttgcgatatatcgattgatctgccggttaaatctatggaaaaggatcgatgaacagggtgttcattgcgagcaccttgataatcgattctttaccataccttcgaatggggaaatatcgataatcgatcattcgcgccacgccactgctttccaggtccgataatgatgcctcaagttgccgttcacgccgtgggcagacaccgggaaaagataggtcgttagataacttagtaaattgcgaaggctggaagttatttttagtctcaactttattcatctcattaggaaaagccagggaccatttagcgccctctcgcttcaaaaatacaaccaccgtatttcccccctctcttccaggaaagacgcagggaattctttctcgaattcttgggaagtttcgagatctcctttcgagtcgatcgtggtatcagagttggggttttgtttttcgtacttccatctatgcaaaggcgagtaaaggtattggtggttgaggctacactggaaaaaaaacacattggatctagagtccagactcttgaaaacattgacaagaaaaaataatcttgattcaatcggatttttgcttgaatcaaaacgaaacccgcttaaattaagaggcttggttcttgatttaagctagattctgattgaatcaagagtactttttcttgtcgatgtttttaagagtctggactctatatccaatgtgttttttttttcagtgtatctatcgaacaagatattgaccacctagtagggctcaggtttttttatcgtttttttttttttttttttttttttttttttttttttttaatttgtattgtttccgaccaaaaatgactcagtttgtcgaaacgtctcaggttttattaattgtgtatttttagccttgtttcccttttttcctccttgttttttccactgttatcattgtctcgggctgctcttaaaaatttgtatctacaagatattgtcgagtcgcttgaagactttcaatgagtctcgtatgcgattaagctctctgacccgccaaatgttcattctttttttcggttcctttgaagatccacccggccgagatccatgatttttaccgctatatcaatactgccgtgctgaggaagaacgccgtatgaaccttcaggcgttgccaaattcctttcgatataacacgaattctcgagaaaacttgtgattattttccttccaatttttcagataattttgttaccgatttcactggaagtttctgaaaatttcaaggaaaaatattcataaatctccgtaacaatcaaaatggtatcggaggaaatgcggtaactctcgaattttcattcggcgtttttccttagcatggcagaataggagatggtccctgaatgagactgctttatctagattagttcacagaggtcctcttagacggcgcaaaccgcctttcaggggttgggctgcgtagcggccagggggtgtgcaccctagtaaacatctattgagcaaggatagttacgttcaggtattacgataaataattagctccccgactatcgcccgtaggaggctaagaacgtagagtccaatcaccgggacgaaaacgccttcaattgatcgtatatgcaatattgacatccatcgagtaccaatagttgtatcgcaaggcgttatttgcattgccgcaaatttccatcatctgagacaaggatgttactgacggcttcaatcacccctcggacaccatatgttgcctaatttcctcaatgatttattttgtgaaaactgagcagcactctgacttaaactcttgtgagttcgtgtattctttatgtatgcgaaaaaattcacatttcgagtttgaagacacagtttgaagacatctagtacttagttgtctgctaaaaaaagaagatgagaggaaatcaggcaatctagaatgtagctacactgattttggttaaatctgtgcaactaaattcggcatcttctataattttagcgctcttcatcattgaaattgggtgattcagttgacgacttttaaagtatatgattaaaagaacttcgcgataattataaatgaaatatttatcaatattttttttcagtttttatgattttttacaccttcccttgtaattttgtctctttctcaattccatctctcaacttcaaatgatacttacttttctacatttaaaatcatgcgttttttgctcatcgtgtgattttaatcctggtctaagttgttccttctatacacggaaaaaacgagcttagggttgggacctacatgttagtgctggacactaacgagggttaggtcaaatggagccaccaagtcagagtagtgctgggcactaaacagctcgaggctgggtcactaaggaagaagtagtgtcaagccctaaagtgactttggagcgagcgtaatatatgaaacgccttcgccagggatcgatctcggatcgcgccggtcgaagaccagcgcgttaccaccaggctatggtgactccgacagctcacgggtgaatttacacctgttaagcgcaactatgtctcgcggcatctgattagcactactcatgttcagtgcccacctgaactgccttccggtgttgagctgtacagcgcttagacgccagccctcaactactccccactaaacggccagtagtgctcaacactagtcttgttttttccgtgtacagctgagaaattttcacgttatgtttaaatgtttaaaattgacactctccgtcgtattaacgataccaattatattcctgcatgtacttttcgttaacgccatatcacgcgagcggacagcaaactatgcaccaaaaggaaaaccttgggccgatcgaagtttatgccgtcggttcacgtctttttctcgtcacttcgcgatatattgattgatccacttttaaacgtatgaaaaatatcgatgaaaagggtgttcgcaacagacaccttattaatcgattctttaccacggctgcaattggggaaatatcgataatcgatcattcacgcctcgcctgcttctcgtcttttatttcttttctgaataaaaagacgatactaacgagttgactcactcaatcgcaataaaatcaatcaattccagtacgaatttaataataataaaaaagaaaatcaagatattggagaaggagaaagagacagagagagaaaagcccgctgatgacaatcatagaggacgagcttcctcgcggaaaagagcaagattaaaggtgaggaaaaggcagacagcaaggaggaaagctagaacgttgggaggagtgacagagaagataccgagggaaaaggcagacgttagtaaaaacagcgatgccgtaatggagtcgaaactgaattgcgccacactcgaattcaaaaagtcgccgacaaatttggcgacaccgacccgtagattaaggaaaatggcacgtttacagtcaaactaatcaaattggatgctgatgcttggttggtgcaaaatagaaagcgtttcctttgccttgctctcgaggccatccccgttttcgcggcgagaaagcgcggatccgatcgcggttttctccgcacagttgcgcgtttttcagcggtggggcagcatccacgaatggtgcggttaaattgaatgaaccgctgtccacggttgtcacggataccgcggggatggaacgagtccattttttcattgatatcgcggcgctcgaaacgcccggctctcgcgcagtggcgtggcgtgcttcgatataatcgatatttccccatcggaagctatggtaaagaatcgattgttaaggggttagctgcgaacaccctgataatcgatcctttttcacggggttaaatgacagatcaatcgatatatcgcaaagcacgccgcgccgctgctctcgcggcaacggtgtctctaaaatattcaattatgccatcatttacagcttagactgggacagcgctaacggacctcccaaatgaataaaagatgaatccttgcgagccggacgcgcggagagagatgaatttattcctgcgcggagccgggaaggaaaaaaaaaaacaaacataagaagaaagctgacgaaatgaagcctttaagataatactttattaaatcaaggagttaaagaaacccatgaataaatagcgtctaatttggtgattttgtccgtttttgagccctgctgcacgccggcgcttaaagttgatgtatgagatttcttttcatttgcattacgaaatgagaagtcggggttgggctgcgtagcggtcaggaggtgcgccccctagtaaatgtcctttgggtaagcatagatgcgtttagatgttatgataaaccatgagtttcccgactctgagggagaggggcctcgcgtcaattcgccgatacaaaaacgccttcaattaattgtatatgcaatatggacatccatcgagtgcgaatagttgtatcaaagcgttatttgcattcccgtgaatccccatcgtatgaaacacggatacctgtgggccgatcattgaaattgatagacaaagctatagacaatgaatacaaagggggtatggagcgatcctattggtcgaaatgtgtgattcttttaaactaagagagaacatgatggactaactgtcgggtttctcgtgggttgccgttagttagtctattacctactgcctttgtccattgctactaccaacttccaccaataggttccctctatatccctttcgtcatctttgtctatagctttgtctatcaatttcaatagtcggcccgctgataaaatttaaacagaatcagcccaagtgcatcagacgttgcctaattttcgctgatgttttattttttgaaaactgagcaactttctgacttaaaattttttttagcatattgtgcataaatgaggaaaaattcacttgaagtttataggcattaagttctcgtgggaaaatgtcaattattagtgagttgcgaccgctgcttgattgaggataaagtatatcaagtgagtaaaaccaagtttgtgccactttctgattggctcaatagtttgtgccactttctgattggctcaatattaaactattgagctcctctgggctcaattgtaaacaaaacctattaagaagaagctaaattatcggggaagatatgaatcaccctcacgagactcgtgcaaattcctgcaataatatcaaggtagatttacacaggtatggaaaagttgaaaatttcccatgagcctcagtacgtgtcacacatagagtacatagagtcgtaatgtaattgggagagctggcgccacttttaagcattttccatgtcccgaattccgagactcctgtgtgacgccgggtcactttttcgatacataatcgattgtttgcgatacacgggtacccggccatccgatgacaacaacaacaacaacaacaacaacgaaggagataggaatcaccatgtattccacaccgccattttggatcgaaaatgtatcgaaaaagtgacccgaactcggcgcacaccgggctcggaactcgtcgagcagaacatggcgccagctctcccatttacattacgactctatgtactctatggtgtcacatgacctcgtgacgtaggttaaggggcccgttttttaattaaattacaatcaaattaacattcaaacgtttgtgcgtttaaacgctaaaattaatatcgtataaccaaaattgtgcaaaaaatcccacaaaattttgacaaacgataaaccgaacataataaatcaaaataatcaaaacatacaaaatggctgacgttaaggggccgctggagagccaatcagaggccagttgtttagttctgtccatacctgtgtaaatctaccttgcaataatatcaagcaaagtttgtttagtccagaacttattttagccgctggaaattttaaaaaatcgcattaagtcttttgtcataattgtatctcgcattgagcaacttgtcggtcaccgtcagttagtctgttacttacctctttcgtccattccaaccacccgatttcatcaataggatctctccatatcccttttgccctctttttctatagttttgtccatcaatttcaatgatcggcccgctggcagaagataagatgacatataattatataaacacaatgagataatttcggtgacattctgtgatcatattcgtctacacaaaaaggttaacaggattttcaatgtttatttttaatgatttacgcacagtggtgaaggggttttgagtacctgttatagattttacctttttctctcctggctcaggggtggatcacccgcatcctttaataggatctctccatatcccttttccattttttgtcttcagtcttgtcgatcaatttcaataatcgacccgctggcagaaaattagatcattatatttcggtgacattccgtgatcatattcgtttacacaaaaaggtttacaggattttcgatgtttatttttaatgatttacgtacagcggcgaaggggttttgagtacctgttatagattttacctttttctctcctggctcaggggcggatcaagagagctttcagtcgtaattgaaattgaacactaagagaggcgagcgagggttaagtggaagttcggcggagagcaatcttttgtctcgcccactcgcaacacgcacatcaataagttcgccgaaagtgaattgtgtataagctcggttctatttacgttcgctctgtttatttgtttccggctgtgttgtatgcagttttaaaatcttacgtttcctcaacgtatgtgatcgataatgttgcagtatgctgccatcctacggaagaacgccgtatgaaccttcaggcgttgccaaatgtcctttggtaaaatttttatttttgagaaaaaatatgatatttttccttgcaattttcaggaacttcaggtgaaattgcgaacaaaattatctgaaaaattggaaggaatatatttttaagtttaccaggatattcatgtattatcaaagtgaatttggcaacatctgaaggctcatacggcgtttttccttagcacggcagtatggtgctatatcagggataaacgacgtacccaagtagcagtatatgatcgcaataagttgcgatttaattggagaatgtatcgtgatttgatcgacgtcgaattattgcaatagtatcggataaacatctgcgataaattgcgatattattgcatacatttgcaatgaaattgcgaatttatcgacagcaatttattgcaatgttatcgaacaaaagatcgtcataaattgagataatatctcgatttcatatcgaacgcgatttcatagagataaaatagcgacaagatcgaggataatcactcagataatcccagcgattttatcgccgaaaaatcgcattcaatttcaaaatctcgcaatttttacgttgaataatgccacttgggtataatctcacgaaagtcgccgaattttctttgattgaatacaattttttaggaaggtttgtgaatactttttcttccgaagtttttattcacaattgacgcggaaggatctaaaaaagttcagaaaaaataggcataaagttcctcaaaaataaatatatttttggggaaaaataggagacgttcaaatgcttacacgtcgtttctttttagcactgtagaggtgaaaaactcaccttctttgttttagttcttagaactatgaattttatttcgatgaaacgaaaattcaattcaaagatcaaaaagtctcagtccaccgaatcgaaaaactttggtcaatgtagaacctgcttcatactgagtagagtaaagtttttcgatgtggtgtactgaatcttcggttcaccgcgtgccgaagcttaatgaagaagttgcatgtgtgaggaatttgcgatttgactactatgtaaaagttcgcgagaaacacgatggtgccactggttctctctgaaatcaactcccaaactcaaaaaaagctctcaagttgaggcaaaaatggaggggatataccacgctatcctgtgagtccacctctacatcaagacaaactctctatgcaaagatagggagcaaatacagtgcacagcttttacataaaatcagtagtcaaatcgcaaattcctaaaccatgcaacatctccattctgtgaaccgaagattcaattcaccaaaccgaataatttcggtcggaaaggaagcatgttccatgtgaagcgaagttcttcgatgtggagaactgattcttcggttcaccgaagtggagctctgttctgtcaattaaaacgatcgctttgcttgtcttcattcctccgacgtgaagcccgttttcccatctccacttgaaccctgttttccatgtaacactgtgctttccagggctcatgagaaaatagagatacgcccattcagagcttcaccccacggactaaaaagcgccctctaaactgtttgattcgtacaaccgagtttttttctctctccgtgtaagacgatggttttttcctcggtgcgctcttgcggaaactccattgcagacaatatgtaccctgaaaacgctatcagtagctttcaagaaaagcatcatgctcaactcagcgacaatcgaacacggataaaggaagagacgaaaaaacggtccaacctttgaactatcgattggcggacggaagttgagtatgacagtcaaggggggcccgggaatgtttagacacgtacgtggtacggcgcacggtggatcgagtcaatcggatatgtcagacatgaaattttcaaccaaaactggaaatttttatgtttaatttgtcacattttaaataataacgggtgcttcttcaggaaaatttgacgaggaaaccaatggaaccacttttataacctcaacgtttcgtaagaacggagttataagcgtttaaagtttccaaattttgtccaaactctcggattgactcgctccaccgtgcgacggagcaagggaaccggaatataagatgcaagggatggggaggaggagtactatctaatgtcatgggcagcactcagggacgataatatcttgagcaaactccctgagctctcatcccttcggacggtgttgcccgctcaaggcctcgcgttaaccggtaactgttgaagatttgaattttttcgcgggatttggcaacgtcgcccggctccagcctcgcggtcggacggcccgaaccgggaacgatggcctgaacacgaggcctcttttcttcagcgcctcgtgtgatatgtgaaatgtagcttataaatgattcacttgttgtcggagatccccacaaaagggatgttacttgacctcgtcgttggtcgtcgggtaaacgcccgaacccgctgcgccagacttccttatttcagcacgcccgcacaaaggaaaaacgccgtatgaaccctcagacgtagccacattttttccgataaaaaattaatttaccaggaaaattgtggatatttttcttgcagggtatctagcatcaggattttccaaattttatcaggatttgaggtcaatcagaatttaatcccgatttcatcaggatttgagaaaagtcggccgtccgatcgcatacgctcatgcagaaattttaatttttctccgcaaaaatcaggatttggaaaaattatgaaatcaggatttcattaggatttcccaaaatgaaaaaaaacaaaacaagacaccctgtcttgaaactgtatttcagcggggatgatttggcaacgtctgaaggttcatacggcgtttttccttagtacggcagagtaggtaggcaggacgtcgtgaggggcacacaaattgcaaatcacgtggggcgttgagttgagcggttccaaaaatccctgaggcctcttgctcctctttgtcagttgaatgaattttttacagaaatgattgtcatgggattgtgacagaaattatttctgtgagttctatgaccatctaaattttgatttttaggtcatagttcatttttccgttgtactaggtcgatttccatgattgcactggctattgacagttgataatctctagctgattgtgaatcccttatattcagatgttggatataagacattggtttttttccatatcacgtgataaagttgtgccttcgcccaattcaacattgtacatgttcattttatttgcaagttcttttaaggattcacccagccaattttcatgatttttacggctatttctactgccgtgctaaggaagagcgccgtacaagccttcaggcgttgcaaaatttcctctcagaaaatatctatttttgaagaaagttatgaatatttctccctctgtgaatatttctcacaagttttaaatcaaaacgaacaaatttttctgagaaatcgggagaaaagtatatataattatatatgtacaaatttttccgaaaattagtgacttgttgaaggaaatttggcggcgtctgaaggctcatacggcgttcttccttagcaccgcggtataatacagtatcaacggtcggtacacagtttttttaaacgacccggtaccgatcactgaaacattcaacctaaatgagcccgctctgttaagattaactaacggcaaacgacacaaagcgcctttgaggggtggggctgcttagcggtcagggggcgcgccccctagtaaacatccttttagcaggaataggtgcgttcaggtgttataacgaacaatcagcttcctaaccctcggctgcagagggttagttaagggacgaaggctgctcatcaagtcgctgatacaaaaacgccttcaattagttgtatatgcaatatggacatccatcgagtacgtatagttgtatcaaggcgttatttgcatttccgcgaatccccatcttccgtaacacatataacgggtcagatttaaccagaatcatcctgattacaccggacgttgcttaatttccgctgatgttttatattttgattaccaagcaacagtcagactgaaaattttatgagtttattacctataattgaggaacaattcacataaagtttattagcattaagtacattagttctctaataaaaaaagtaaaatatgaaaggaaatcagacgatcttaaatgtagtgacgctaataattttggtccagtctatgcaactaaggacgctaaattcggcaatttctgtgatattggtgccctttattattgaaattggatgacgcagtcgacaaatcttgatgtatgattattattgaggtgtccatttcttgttttttattttcgacttctgcgatttttctttttatttatcattttttctctcttcaagaataatttgtttgattatttttgttattatttgttgacaggaatggcccgtcggagctaggagggctttggtccactcgtcgccaaaccagccaaacggatgattttaagtaggtatgatgcgctttgcaaaattttccgacactttttttgctcaggcaaaattttttcattttgtttgtttaaattaagccaagtattagaggaaaaagttgacaaaaagtattggctacccgttccgtaactggtaatttttagtgaccaattactaatgggagtagaaagagagtccaaaaatatctctcacggtgcaaacttatcggaaaggtaacgtcaccgcaacaagtgtcaagaatctcataaatatcaatagaaaacaactagtgagcacatgacgacggtgcgtttttgaaggcacgcgactacacgaagacgtgacattattttggtgcgcgcacagagcgctatttgaccctacccctgccgtttgcacggaaagattcggttcaatttcacccaggtttttcagtcttccgtacgcagtctcacgtactgctgtgctaagtaaaaacaccgtatgggcagtcgaatgttgccaagtctcctctcagaacatatttatttccgaggaaacgagaaaaaaacattttctaaaaaaaaacacttacaaaatggcccgaactgtatgtaacaaggtggaggaatattcggtgctgggtccacaccattttgcggggaaaacaaagcctagaaattccaagaaaaaaatttaattagagtttttttttttttttttttttttgctctaatgagtaccagtatgctgtgatggcactcattagaacaaaaaaaaaaattgactctaattgataatgttttggaattttttggctttgttttccccgcaaaatggtgtagacccagcaccatttcgccaccttgtttctgagggaagttgtgcatattgtttcttgaaattttcagacttctcagatcaaattacgaaccaaattctttgaaaaattggaagtgaggctgtcacaaattttcctgaaaatccgtgatttgtcgaagggaatttggcaacgcctaatggctcatactgtgttcttccttacccccaattaactgtagttgtaccccaataaattaggttactaacccaaatgttgcagtactgccgaaatcaattagaaatccctatactatcatacgaattggggtagcaccacaattttagatgataacccctgacactttttccccgcggatgctcggttcagagtaataaagaatcacatcggaagcgtaccaacaggagcccgggtttcctgaactatagcttcattcctaacactaaaaacttagattacttggaccaagagctccgcgaaccgatattttctcaccgcagaggtgcgttgctgtacagtggcgtggcgtgaataatcaatatcgatatctcgccatttgaagctatggtaaagaatcgattactaaggtgttcgctgcgaacaccctgataatcgaccttttttcataggtttaaatggcataacaatcgatgtatcgcaattcacgccacgccactgttgctgtagaaatgctaatatttcacggaagaaaagttgccggtggaaactgttcaaggtgagcttgcggtttggaggtatattgatagatgccaagcggaccagagaggaaggacaccgcgggggagggggggtagaaaaataaataatttggaccgaggagggaactcatccctgagtgcagtttattattgatcacattttctgtgtgttttatggagagccgggagtataaagtggagagccgggagtctaatcaagccggggatactgccgcgctaaggaagaacgccgtatgagccttcagacgctgccgtatttccttcgataaaaacctaatttattaggaaaattcttcatatttttcttcaaatttctcagaaaattttattcgcaattttatctacaaagtctgaaaatttcaaggaaaacaacgcatatttttttttaaaatacatattttatccggagaaatttggcagcattcggatgttcatacggcgttcttcctcagcacggcagaataaagccccggatataaaactggaacactaataattaaatagcattcgtgcatcagtcgagccatcgcgactatctccctccatatatcccgccttgagcgccctctcgctcgctcccccctcgcccctcctcgcccccccccctccccaccgcctgtgcgcctcgtagtgcaaacataaaatatctacagctgcaggtatattgtattatattccgcaaagtttggaagggctcagggtgggagggggaggggtggcattcttggctgatttattggcagtgaaggaacggctcagttcgctatctctgccttcaacctttccaccgcacgagtcgggatcttatttttgttccagcctttccttccatcctccactctgccgtgctaaggaaaaacgccgtacgaacattcgagagttgccaaatttcccacgattaaaaatgtgtttttgacaacattcatgcatatttttccttaaaattttcagatactgtagattgaattgcgtacaaaattgtctgaaaattcggaaaataatatttacaatttaatccagtaaattcggtttttctcggaagaaacttggcaacatctgattgctcttacggcgttcttccttagcacggcagcattaacctatgcgttccattcgcgtagaggaggggaaaggagcgaagcagagtggaaggaagggaaaagaaagaagaggagagacggtgaaaaggagggaaaatagaacgatatacttgggaaaatgtctatgcagagtttataataccatcagaaacaatttttcgaaataaacaatgcggtggtgcgaaaaaaatgtaaaaaacaaaaggacatagccgacatcctgagggatctcgtcaaatatctcctcactttcaaaaatatagttaatatagtttttgttaaaatgaagaagtcttttccggttcgaggaaatacctcccgaaagtcctgtctcagtgttttcaagccaacaaagccaacaaatctgccaacaaatttttatctctttgcataatcatcagttaaattcacttgaaatccacaaaaaatgacgcttgaatctatgaaaaggtagctttaatgataagtgattttgatcccgcgtccttaaacgaaggccttgaaggacaatgcacataagtgaaatttaaaaaatattgaaaatttcacgaactcaactaaaactagtttgaaagtatattctgtgaaaaattcaccactaaaatccaacttaaaatccttaaacatctagtttgaacttcctttctatcataaagctctaagtaattttgaaacttgaaacatgtatttcttgaaatagcaagaactgcacttctgcgccttgtccttcaagcccctcatttggacatatttctgcccaacggaaccatgtgcattaagacatgtgtcctaagacccataatattaaatgcataacagggctcacgtcatgattcgcatagttccgtttggcagaaatacgtacaattcttcgttcttttataagaggaaatacttttttaaggcaaacttaaaagtgacccgaccgaggtacttccgcggagtccgtgcttattctccggggagcacgtatacggactagatagacgatgggcctcaataccctgtaccctgtgcaaagggcgcgtcgattaactgatgaatatgctgctgcactctgctctgacgtcagcacagcgaagcgaggagggactcaatgatgcatgcaacaaaattttgaaagcgaagaatccgcattacgtcatcgttccctcctgcctctctctagcgttcctctatttttgttcaactattcaaagttaaaaggttcattcaatgaggggcacaagcgccaaatttttcaaaattgagcttttaactgattactcctctttgaaaataaatgcttcattgtgcaaacgaataatgagtacacacaatctctaatgccctaaaatactgccgtgcttacgaaaaacgccatatgagccttcagacgttgccaaatcttctccgataaaatattaatttttgaagaaagctgtgtatattttactttgaagttctcagaaataaatgcttaaattgcgaacaaaattgtctggaaaattggaagaaaaatatccagaatattaatagtacattcggtttttatcgaaggaattctggcaatgtctgagagtctctgcggtgtttttccttagcacggtagaatagctcacaagcaagaaagatgaaatttcattggcacgattccattttgatagaaattttcaaaccgccttatgttcatttttagttgtaaaaagtgcgggagtcaattcaaaatttgagtggcgacctgatcccatttttaacatgcaaccacgctattttagtgatgcataaagcctggttctttcacctaatatatttggcagacaatttgagtgcctgttaatttttgtctcgagggctaaatttttagccaaaaatgtctctttagggtcagaagtgtcaatgagacgtaggcaatagagaaaaagcactcagatcacggagaaaaaagatggtaatgaaccctttgatatttaacgacactgcgcacattctactgtgcatgatatgaaatttggtagcccactatgttcatttgatattttctgtgtgcagtagattgtatgcaaataggagacaaatttgaagcgattactccacacgcgccgagttctgcttccaaagataatttataaaaatttccttgacccaaatatttaaagcacgtttagccgaacatttcaatgttttctctctattatgccgcttttcattgtgatacttaattaaactttaaaaatctcaagttaaggagcagtttgctgaactgtggttggattagaacaggatcggtttagttacgctcgatttaggctaaaagaatattgatgaaaaatgcaaaattttaatggctaaaattggcctgacggctgtctagctcatgttgctctaattagccagaaaaattacaaaacacattgaattacaaagatatgtgttgctcacgtagccctagaagcaccactataaataagacaaacggaaccaactcagcacggacatagagcaggggaaaggaagcgcgttcacgacggcgcagtgatacaactattcgtgcttgatggatgtccgtaatgcatctacaaaattgaaggcgctatggcgcgaggcgtgaagtcgcaacgcttcgcactatgttgccaatgaggtgtcatccagattcggaagaataatgcaaaaacgaggcccgattacatctcttctatcttcagctgtgtcgacactcgatttgtcttggttttctttcaatctgatatctggttctttaattaggttgtattttaagatcttatctaaaaatctaaaactaaagatctaaaacttgtatgtaccagccctgcaagtcccctaaaagagatagtcgtgttaatttgacccggcttggaatttttaggggtagtcgccgacaaaaaaatccctgacactcgattttatacctcattttttcctcaatttgacgtctgaatcttattttacgatgcatctgtgtagtcctatatcgaaaggttgaatgtaccggacaatccgcggggcttgtgttttcaacaagcctcgggtcaatgggtcagttgcgcaggtgatagaatcgtattttgatgcttgatccctgcagattagctaaaaacaacaaggtccgtccaatcagcaactttttacgttcagtatcaaccgatatattgcgcttcgtaaaggtctattcatgacgtcatccaccgcggtagtgacactcttgatttcttccatcttgatttcaaccaagtttcacgcgggataaccagtgctaatgtgcttttcactgattgacgagagcagggtttagaagaaaccaagggtgtcactcactgaaaaaaaaagtagcttggctcaagcatgatgattcttgagtttgccgccaagaatttgttttatcttactgcaagctgaatttttcttgatacaagaaaaattatgcttgggttaaacaaaaaagtagtttatattaaccagcaaaattcttgattgaagaataaatacttcttggtggcaaatttaagattctttttttttttcagtaccgcggtggttgacgttgaaaatcggatctttcaaagcgcgatatcttggttaatattgaacgtaggaagttgctgttgggaggatattattatttatagctgatctataagattcaagcatcaaaacacgattctgcgtggccagcgcaatcgacccattagacccggtcgctaacactggaaaaaagaaaacacattggatctagaatccaggctcttgaaaacattgacaagaaaaaagtctcttgattcaatcagatttaagcttaagtcaaaaggaaatccgctcaaattaagaggcttggttcttgatttaagcttaaatccgattgaatgaagagtattttttcttgacgatgtttttaagagtctggactctagatccaatgtgtttttttttttttttttttttttcagtgaacggttaattggcggaatattctctcttagctctaagtttaacgccaagcctgcatgaagcctggagactaccatcataggccacggtaggcagcaacgtcgtcatattgccacccgaggaaacgaaataaatgtcctcctcgtttctcacgcgagagggcgcgtccggctctcgatgataagcaggctcctggagtatatgctcgatgataccctcaggcatgtacatttgaccaacgaacacgtcccattttagcacagacaccaagacatggaggtggattgcccggcccgcgtagtagccggggaccttggtgaggaatctgacgtacccctcgtcgtcgctaacctgcccaccgcggaggaatgttgagttgtcggtcggcatctggtgacgggccgacgtcgctacttcgtccgggcttcttccgaggtaccccgagtagaaaccttgtgcatcgcaactccagatttcaacggtagctccgccgatgccgctgcaggtctcgatatcgacgatctgaaactttaattcgagattgacacctgtggtgttttctcgcacgtcgctacggatcttgtgcaagtcgatgaagtaaggaccttcgatggaaaccggtgatagttcgcaatcgtgacagttgcaatttgcgcttacgcttgtgattggtactacaactgcagtcatgagaatggcgattccggcccgtgtcagaagagagtggcgattggtcatcgcacgaaccatcaacaccaatggccagagggggtttttctctcgcgtagaatcaggccgaaaatcagtggttctgtgaatcattcctttatctcttttcatctacttatcgttgctatgttctctcgggtctttgccaccaggtgttattttgataatttttgaggaaatgcagatgcacgcttgaaaatcctatcggcgatgtttgaggattctgatgatcattgtctttttgtggttgtctgaaataatgacggaacggaaaattagtttgcgtctcagagagcgtgcagatggaggttgaaaacgcatttattatagagtggtttcctggcaactttggtagaaagaacaatggattaaaaagagaggagggaggaaagaaagaaagttacagatggacacaatcctggatagttattgaaaataggaaaaaattaaagaataggaggtagcataaggttgataaaattaagagagagactgtttaaacttccaactgactgtgagaagagagaaaaggaaggaagaaacgagataatgatcgattattgctcaaacgcacctgaactgatgtaaattgactgaggaccaacttcaaaaattgagagatttttattttgttgaccttttctcttctatcgggattcatgataattctttaaattacccgcttgttattcttaaacttcttcgtagtttttgtcctatttttgattatcggaccaataataaaacaaatagaacaccaactacttaggagatcagaaataacaagccggtaacaatttcaaaaattgaaatgagaggttttctgttattaaatttatttttcttaaaagtacgccgcaagtaccgcaagaatctcgagagttcatttaacatcgattaacatgtaagtaagtcccatcaagatgatgaatggccacaaaaattggaatgtttttaacctgttcaattattctggaggttgacacggcttgttgacatttagacaaatactttcagatagtgtatcttcgaggaatttgtaatatattctcatatgttggctagtattaattgtattcttatcctttataattatttaaatgaattaactcttgaactataagatacgccgacagcggtcacgtgccatccgtaatgacgtcattacgatttagtatcttagactttgtggatcagggcattgagccggaataaaaatggaggctaagatttctgtgagatttcaaatcgtttaaatagctgatttagtgacatcaagaggagttaatgaccaccagatatttgcggaagagccccggttactgatgcaatttggataagaaacctgctttttgttgatttcctagtgggaatatttggtgaaattagtgtaggtcagaaattgatgcttgcggaagagacttggtaagggcggccgcagcgatcggtgaaattcggagaaaaacaccggtgtgaattgaaaaatcttaaaatcatctgattatggaagtaacttaggaaatgtttagcttctctaggtgtatgtgcatataaagtcgaattatatataaagctcaatacgcgtcacaaagagtactaaagaaatgtgtcaaataataacataaaatgaagagggaaaaaatcgagaatgtcaatagcgatctcttgaacactatggattgcacgcaataccatccgtattaactatgaatttcggtatgtgggcaaacatgtagatccgcaaataaccgacgtatgtaacggttttttgatagaaaattagaaaattacattgataatcaattgtccaaaaataaatgagtaaaattgcagaaatatataggtatatgagacttataattcccaattaacaaactttggcaaggaaaaacatgaaggaacaaaattacttactcatacttagatgacgaacgcgtctattagggtttgcttcgctctactgcccaacaacgaacttactcatgataattatccactctgtaacagctgaaagttttaaaatatgtttgctgtccgaatggtatgtaaattatgaccgactttgttaagtatcagtgacggagaaaatcttcaccgtgcggtatgctcatgtcgatacagcgatggttttcgcgagttgacaaccctgctttttctctattttaacgcatttttgtcaaacggaactatgtgcattatgacatgagccctgatatacatgtattcttatgggtctcagggtctacaacatgccatatccaaaaacatctaaccacaaaacaagatcatgtgaagtccaaattgcgcgtctcaggataggtcacacttttttcactcactgtcatatcatctccaaagaaaatcaacccatctgtcacttctgtaattcatcacctctaattatcaaacacatacttatggactgctctgccctccaatacctcccatcacagatctactccccttcaatgaacggaaatacaaacccactcgcatgcgatgagcccaatattactaccaaaattctctcctctcttaatttaaaaatctaaattttcgtatatactcccattttcaaaattatctgtaaagacgttattagcctgtgacgctgaacgtcctaaaatatacttactaactaactaactaactaactaactaactaactaactaactaactaacatagttcagtttgatagaaatacgtccatgtaggtgtatgtaaaccatgatttcagtagtttccgaagcattcaacgtgttttggatgaaatattgataaggtactagtactaacttaatttaccctgtctgataatccattcattaggtaaccaaaagctggcaccagtgaacttggagtgagctctcgtataaacgtatatcaatacaatccgtccgtatggcatcgtgcgatcactgcagtagcgcgatactcaacatgccgatgatccaataaattaactaccccttgtgtttttgttaagcgcccctaaatagtccgcgcacggaggctgacagtgctgacactctcatgatagatgatacccacccattccagggctttcagtgtttcctacctcttggtagtggtagttttcagatattgctttgcactcgcgttgaggatgccttgaaaattaatttctttacttttccggctctaaacttcgggctcatccctgggctacgtgacgtcaaatcaacgggtttttcttgttttttatttcttttttttatcaaatgccctgtgagaaacattctattgtactaaattgctaaatgatcctaagttatattactaattatattaattgaaattgtttaacgtcatagccttgctctccccacaaaataaggtgggaacagcagtactttaccacctcgttacatacggttcggaccacatttgttagtgtttgtttgttcttgttctatttacaatgtcgattttgacccacccttataaactatacgaggatttaaaaaaatcgtctgaacgtctgaaacaaattgaagtctttatctaaggatgatttccgaatatttggaatggaccactagacaaggtacgaatttaagcaatctgatacgtgttcctcaaccagaatttcacgtagaacacgattcgcacaacgaatattactgaagccaactcgtaacgaagatatggaactacttcggaccactttgcaatgctgccaaggtgctatacactcatccaaattttgaggattttattgtaaacttgattgtgaatttaacgtaaaaaacccttgagaactaactgcagccacacgtgctgcttaagaaaggcggagcgccttcaattttttgtgtatgcaacatggacatcccaagaacacgaatagttgcatccagatccagccattgaaatagccggagggctttcaatttttcaagcgcgaatcatctcttcaacgattcacggacgttcaagcggtgtgcagcggaaaatgttacgaaccaatcggcgtcacgtatttttaaaaaatttgtcagtaactcgtaatgttttcagcggaacagataaaatgttttatgtgtagaaatcaaaatggatgttattgttatgttatgtttataatataaccattccttatgttttaagaacattgacataattcgggaaatgctacaaggttgttgattaccgtcattcaaaagttcctctccaccgagaattaggttaattctcagctatacttaccgtactttattccgtatgcagtacgtctatcgtacttaaaatgcattgggccaaatgtgagggcagtaagtcactcaaaaatgagtcgttaagaagtggattaaagcttagtcaggtcaaacaagaatcggagcttaatttcccatttcgacagcaaacctgtcatgctaaggaagaaccccgtatgaaaattcgcgagttgtcaaatttccccggattaaacatgtattttcgaggaaaatctagcgtaatctcccttaaaattttcagatactttagattaaattgccaacaatttcccctgaaaatgtaaagaaggatatccatagtttccccagtatattcggtatttattcaagcaaattcggcaacgtctaaaggctcatacggcatttttcccgtgtgcagtagagctgaccccaaaaccgcgaagaattacgatgacaagtcggcagacggtgagaattattcagccgtattcggaatctccaattaagatatttaagccctcatcacaaagcttctcgtgaaaacttggctcatgctccgatattctcacgagcagggtcacgtctactgttatttgcggctatttagaggcaccacggatcaaatccctttgttatttttcctcattgttcctttcttagcaatgtctttcacgtccgaccctccgatccatagttgcctgataatgctacaatttcagcgcttccccccccccccccattctaacccttgtaaaatattcgcattcaattgcgcaatctggcaacttcgcttggatcggagggtgactcgatgtcgaaacttctcggtcgacaatccgacgcgacgcgcgtcgaagatcacaacttttcaactgatccgacaccaagtttcgccgaaaaataacgagaacttcgcgtcttcgaggaattctttccacatgggaaaaagcgtttcgggtacagcgctgtcttctccccccgagacgccgagaggtatttatggcccagtggcgaggcatgaatgatcgattttcaatatttacccgcatttgatgcaatggtatagaatttattatcaaggtgctcgttccgaacaccctgtatatcgatcctttttcacgggtttaaatgaccgatcaatcgatgtatcgcaaagcacaccacgccactgtcatgaccatgaaagacgtgaagctccgacagggaacttaaatctctcctcgagtcacaagaggtttccgtaaaaaaaaatggtcactcgctagtgaacaatttgaggatacactttttggtatttctcacatttaaacgggatttctcttggaaagtttttgaattgccttgagctgtagtatcaaatttttcttgaaatttgagaaactgaataaaaatacatgaaagtcctcaaatattgggtatgatcgccaagaaagtcggatctcttttcctgtatgaagattttctgaaatgtcaaatcgttttctccttaaatcatacttttttttttttttttttttttttttttttttaaataaaccaattattttaaatcatactcttgcattccttgcaattttgcaaaacggtatcgcagaatagggcgtatttctgccaaatggaactatgtgcattgaaacatgaaccctaagacacataagaggacattcccggcagggctcacgtcctaatgcacatagttccgtttggcaaaaatgcgcccaataaaggtattgatagagaaacgtttcatttttaatgcgtttcccgaggctttgaaattacttcgcacattttttaaaaaaacttggaacatcgttttgaaagtccctgaaagatccttaattttaaaatataggattccctaaacagtttatatgtcctcgaaagttcgcaagtttaattttgaagatatgtcataaaccctgtataatttgcttggttgttcttgtattcgttttactctatgtaaaaactgctgtcccgattcacaggccccaataaagtggcacttttattattctgaacaaacttcattgaaattatgtgaaagcaaaggacttaaatgaacttacttcaaacgagagcactcgagtcaaaaaatgccatttattcttcaatgctcagaatagcataggcggangggggggggggggggggggggggatagcacgccccatcgttcgcccaaaaacaagaaggaagaaaaagtgaaggaagaaagaaggaaggaacggtggaaagaagaaggaaagacgcgtacatttggttatgacgaatttgacttatactgcacagcacattagatgcttcaaaaactcaaaaatgtgcccctcttatcccccttccacccccctttcgatgtgtctggttcggtactaaataagataaacatagaatacacaataaaaggagctttcctaaaaaaaaaaaaaaaaaaaaactgatatctcgattcttctgaaaatgttctcaacccttttatccacgacacctgatgaccttcatttgcaacggtcactaatgacataatcgatacaaggcggtttccgctcaggttgtttccggcgcccggcccggcgtcacctcaacccccgacccctccgaaaaagcgggcagctcaaaacgtcacgcgcaaatgacctcgcaaattctccgagacaccgaaagggtgcggtttgcacagttagcggtttcattccaggctcaaccgaggagttacggtccaactgttttccttcgggtgtgtcgcacggtggaccgaatcaataggagaggtcggacataattcggaaactttaaacgcttataactccgtttaagcaaaattttgcgattctgaaagtggttccattgatttcctcgtgatattctcttccgaaagcaccccttaaaatttgaaatgtgacgaaataaacatggaaatttgctgtctttgtcgaaaatttcatgtccgacctctccgattggctcgacccactgtgtgtcggttaagaaggtgcaattagtcggagggacgttgaatggtttaaggaattgtttttcgggggtaattgtactgcagcagtggcccgggtgcgggcgggggcgggggacggggggaggctccgttgaataatgccgctgcagggtaaaagctcaagcatagctccgcttcccatccggttgggggccggtggcggggggggagggggaggggggcgcagggccgcagttggagacacagacaagttactgcggcaattattcagacatcgctgccaggttactcgcctcatccattgataaattatgagaggtccttcgtgttacggaagaggttaattttcgcggagtcccgccatcgaatgcaacggtttaaagggtgaaaaacacaagaaaaatgggtggccaagtcggaaagcctggaatgtctcggggtggtttcgaccccctccttgacgaaggaacaaaaatagtaaaaaattacacaaattactaagtgataacgtcactcttgtgttatcacactggaaaaaaacacaatggatctagagtctagagtccctttatacccagagttaagacaactcgattatcagctgactggcagccggccttggctggccatggaggccgaaacgagtgcacccaaacaaacgatattgagggataaggatcaggaatctgcgatgtctgtcacacaaaagcaacaacatcaacaaattgatcaattaaaacgaaaattagactggtttgtgaataatttcttaatctattttcattttagaccgatggaaatagcaatttactcttgataaaccacaattaggtaatattttcattattcctgttcatattcgaggtaccgccatcttggtgcacttcggcctccatgagcgagaaccaatcagaattggattttttttaggccactttcagcccaaccaaaagtgagttgtcttaactctgggtataaagggactctactagagtccagactcttgaaaacatcgacaagaataaatactcttgattaaatcggatttttgcttgaatcaaaacgaaatctgcttaaattaagagacttggttcttggttcaagccagattctgattgaatcaagagtactttttcttgtcgatgtttttaagagtctggactctagatccaatgtgtttttttccagtgcacgtcataatgcacatagtaccgtttgatagaaatacgtccaatttataagtgataacgtcactttttgttatcacgatatggggatctgggtattttgatttttgtagttttcatatgtttttgtttcctggtcgagagagcgttgacatcaccccgaaatgtctcaggctttatgttttgttgaactctagccctggttgcccgtttttcttgtgtttttgactggttaaattattcgggcgttttgcatgttttgtgttataaagactatagattagtggtcgcaaagcctcttaagtccccatggcaatacgtcttgccaccattttagtggtgctagagactagcgggccgattattgaaatttatagacaaagaagacatagggagcataaagcaatcctattggttgaaatgggtggttcttatagactaagggggtaattgatggactaactatcgggtctctcgtgggttgccgttaattagtctattacctgcgtcctttgttcattgaaaccacccgcttccaccaatgagatccctccatttcctttttgtcttctttgactattgctttgtctatcaatttcaataatcagcccgcaggtggcaatttaacgctccatttcaagttctaattcgagtcgccaacgtcgccgtttgagagcaatacactgacaccactgaatttcttatgggcaagttctattgttttattttcacagcataagggagattaattttttgtggaatttttgacagtgtgaaaagtaaaaatgcggagagttaaaatcgactcaggactggagcactgtaaaaattgtgaaatcttcgagttttaggaggttaaggtaaagtgcacccaacatgaagcgatcattattcaatggtcgggttcgggtggagttgttttcctctgaacctttaaacctcaaaaaaacatcgattttatgggagtcttcaaaatacaggatatgactctgaaatttgttatctcattagggatacgtcccctaaccgcttcgcggcccgcgctttgcgtcttaggcatctcgcacaaggtgtctactagccctgaaagtccggaaatagtactgatttttgaaggcggtcaggaagtactgaaaaagtacggaaattccttataaaggtccggaatttttcgtttcatactatgggtgtttttaaaacagactggaaaatatgcaattcgttgcgcaatgattcttaattcagtattttcccgctagatcgagagtaaagccagtcgattctcaggaaaacgtaacaaacaatgagcttcgaatttcctggctacgtcatttttctcgcgatttgcgcgtgaatttcgacaagtttcgaatttcgtcacttaaaggtaccaaaaaagcactgaatttttccgcttatggggtactgaatttggtggaaaggtactgataaagtactgtaaaagtacttaatatttgccagccagttatagtagacctcctattaagtgacacaagaatcccgatacggaaagttggcatagttttgaaaacgccttcaattgtggcgtgatacctcgcgcattccggagagtacgaatagttgtatcattgcgccttggcaatgctatggaagattaatattgaagtagcctctacgctggatttgtcggttttcttatgtcgctatcgaagttttgacctcacagtttaagtgtgttcatgatgtggttatatttagaaaaaggataatgaaagggcgtggaggacaaggcgcataagtgcagttttcgaaaaattgagatattaacaatttcaagaagaactagccttaatgcatattttgcaaaaaagttgctcccaatttccaatctttatgcagcaaaaattcagttcgaacaccacaaggatccatgtaatttcgaaactttaaacacgtatttctcgaaatagcaaaaactgcacttatgcgccttgtcctttaggcttctcaattgttcgcacatttatgagtgccgataaatacttgtatcaaaacttcctactatagaggcaaaagtttaataacttttggcgtgttatccatcggctacatcacgacatgatatgcacggaaaagcaagaaaaggcaaactcttgatgaagaaacgaggtgattgctgtaaaaatattcgactcaaattatcatccttgtgggaattgagtaaaattttaacttaaatgggattcatttatttcgttcaacagactcgacttgagagagatttgccgaaagaattaaaagtaaacaaacaaccagttttaatagacaccctacttatgcgacacaagaatcccgataaggaaagttggcagttttgaaaacgccttcaattgtggtgtgatacctcacgcgttccggagagtacgaatagttgtatcattgcgccttggcaatgctatggaagattaatattgaagtagcctctacgctggacttgtcggttttcctttgccgctcgcgcagttatggccgcatagtttaagtgcgttcaagctaggattgtattaaggcaatggataatttttgtagaagaattaaaaatcaagttaaataaaaggaacccaaatcaacaagcaccttaaaggtaccgaaaaagtactgaattttctctgctcacaaggtactgaaaaagtatgtaatttttgccagccagatttattagacaccatgatgctttaaaagtcactattatatgatttttttatcataaagtacgatttaagggatgtctaagtttcatatttagatatggctcatcaaataacttgtttgaaagctaaaaaatcgagaacaggaaagcttcgtcagaaataatggaaaccatcgacttacggaccatccctgttctaacttagctttggctcctgcttgggcgcgaaggagggggggggggtagaggaggtacggtttgtagagaataggattagcaaatctttagtcatgttttgtcacgtatgaaaaagaggccttagctaaatgttcaaatattcttgtcagattttagtacaataaatgaaatttcaatatcagagacgagaattgattatttaaggtatttaaggtactaactaatcaacatgctcagtttgactacgtgtcttaaacacacggagaaaaaaaattcgtgcgtgggacccgaagtttaggttatatggatctctgaagtttttcggattgagcatctgaacactttaggtctagctgtcgaggcccggatcacacacatctgaaacttcagttcttacatctgaagtacttcgattttcacagccggaagacttcggttctcacatctgaagtacttactgaggatatgccaatcgattcacatatctagtttgctagtttttttgttcagagactctacttttaattattcgaattttgttattttcttttatcgcaaatgatccatcccagactcacgcgcacttagacgctatttactttttttctttaggtctgatactaaattttttctttggtattttacctaatctgtgcgacacgctcccaaaaacaacgtgaccaccaaatcgcccgaaacagaaattaatattgaacagatcattccctctttgtataatcttaaatgagcatctctgaatctttgaaactgtcaagatgaatgatgactacaatttaataaggtttaacttcatttataaacataggattttgtttcttagttgctacgtgaaacagcattgtgtgataccttttgtcatgggaacggagttccccatgatattagaatcgttccgttgctttcgctatgggattctctatacctctgcgaccttgagcgtttcgcccagtctccgatttttggttgattttccgatgtatcaaaaaccgttgtattttttagccaatcatgtctctacgtcaagttgtgttgattgctaaaattcgctttcagcgagtttttttccaccttgagatgtcgtgtctgactggtaaatctgcgcagaaccacgaagttccgtttttaggcaaattctttttttgggaggttctgattggttatttttcgccatcagttttctgttcgttggtgcaaaagatcgcctacctcggtgttcttgagaagccgccattatcccacctcaaatttgaaaaatagaagtaaagaaataataaccatcgtacaaggtggaaaattgttctgcaggactcgttacggataaagaagtcaaaatcagagctcgattgattgatttaattcatggatacgcaaatattgccttagctcaactgccgcgatcggaatgcatgctgggatgaacctcgagacgcattaaaacagtgcgaaccatggctcctacagcaatgcgcttcatatttcaaaagcagtcaaggtctcttgtgataagtcccgcccattgcccgagtcttttaaatgctatttttactctcgctcacgtggaaccgttatagcctagttgactaaaccgcctcgtctttttaagtaggtgcgggcacccggcgatcgggagttcgatacccgacgatgggaactactttttaatggttgtattgaatgttttagactaatcatcaaaaaataattaatactagatgataaatgtacgaacattttctcgtgagttaatatgttaaacaaaaatactggaatatacctccttcatataatcagccacatgttcccccaaattaatgacgttattttcttttttcaataaagttaatttacattcaacgttcgtaagttaagcaaaaagtacctattgatacaaatagaaagacatgaaaatagtatgtctaacatttcagttgttttttttttcatttattttttgtttttttaataaaacaaattgactgggactagaatcattgtatctctgaagacaaaagctaagttttttgatacagaaatactaatatattcatatcctttatataatcagggagatgttgacccaaatattgatgtatattttctctgtttgccgaaattaatgatggtattttcttttttcaataaaattaatttacattccacgttcttaaagcaatattttctccaaaattcagcaaaaaatgacaatttatacctacgcaaaaagtaaataaataaataaagcaatgacatgaaagtagtataggtagtacacatctaacatttcggttacatctatttgaatgaaaaaaaatggcaacttaggaagcacataggtcactttatgatgcgtattcgggcatatgcgtagagtaaaaatatcatactttacgccgaaaaaacgaaactgaaagttaaatgcgttaacttccaaaaaccatacataatccaacgaaaataaataattggtaaataacagctttcttgtatgcaaagaaaaaaaattaaaaatgttaaaaaagagatgtcgacacaaaattacatagccccttcaattctgaagatactacaaacgaactgtaccttaaaattttcatatcccagaagcaaaagttcccatgacgaatattgctatcgctagcgattgcaaaaaccaacttgttgtttcttcgagccggaaagtgcaaaaataatgagaaaataaatctgatagtcagaaagtagcagaaaagatgacaatttgcggtatgcacggacaacggtatgcactgttaatggaactcatgagtgaaaggtctattttttcgggtagtttgaaaaatgcgacgtcgagcaaaattacatgttgtctgcatttggatctaatcgctttttaatgtccccagggatgcagaggaacagaatttaaagtcataattttggccataaataatgtaataaatgtgtgaattgaacggtgccaaaagccgacaatagaaccggctttatataggtttatggcttaggataggagtatcagtcgattgctttagttttttttttttttttttggggggggggtgtaattatttttcattataaaacgccttcaatttactgaatatgcaatttacgatggtggtgcatgaatagttgcctaatttagtcaatgaagaaaatacactgagacagtgacaccgggaaaactgcgatatttacgtgggttaacactgacacacagaggaaaacgtcgcacaaacgtttgaatgttgccaaatttctcctttgctcttattataattttaaagaaaactgggtgtactacaaaagctagtttagttacatcaacagtaaacatagaaaaataatatctcgtgtatgtctccttttctaattttaccgtggaagaaaaaaaaacctattgcttagattaattttagaacgaattctatcgttgacatattattattagcgtgttacactgtttcttcttaccttcataatgagttatttctcccaaatcgacggagaaacgcattttcgtcctcattatctctgtcattctactaggcttcaaagcatgttccattctcgaagaattaaaatctagcgccgcacggtggatcgggtcaattagagaggtcggacatgaaattttggactaaaactgaacatttttacgtttaattcgtcaaattttaaattttaaggggtccctctaaaaaaaatttcacaaggataccaatgaaaccacttttcgaacctcaaagttttgtacaaacggagttataatcgtttaaagtttccaaactttgtccgacctctcctatattgactcgatacactgtgcgccgcagcctcattatccacgtcgacgcgtaaaaaaatcgcatttacccttgtcattctagcgggcttaaaagcatgttccattcttgaagtatgaaaatccagcgtcgtggtttcagaattcacgtcggcgcgtaaaaaagttttatcggaaacttcaaagtaaactttttttaccgaatgctatttttggaaaagtcatctcgtgcgtgcataacacgcaaccccattacgtgagaaagatagtgcgtcatttttgacgtatgatgaaccgcttctgagctcaagagagcttggaagaggcgtgcatcgttcaaaaagtaatgtaacgatcgcgatactgagtgaacggaaagagacctctgacatacgaagagtggcaattcaaaacctggtcggcaccattgagggttgtcaaaatcgtgcaacgaaaagtctatacggttgactatatttcttgtgtgcgttatatcacaaaaatgaatgacaacatcatgccatcagagttcaaaaatcgtgttcgtaattttttttcttccaaattgaaaccgcaaccgtaggtggacaaaaaaacaagagtggatctggttttatttcagcaaacgggcctgacaggaaaaggagaacaacacgagaactcgcggaggcgtgaatgatcgattttcgatatttccctatttgatgctatggtgaagaatcgatcattaaggtgttcattacgagcaccctgtttgtcgatccttttccatagatttaaatacgatataaatgatataaatacgataatcgatatatcgtaagcaatccacgcgactggtgctcaatgtacgtccatgctccattcccttcaaatcgaaggtgcgctggcgctgacttttattacacgacaccttttcgaagcatctttagtgtcttcgttagtcggggcctggaacttcgaatgagggacgccgcacagtggagcgagtcagtgggagaggtcggacaaaatttgtaaactttaatcgcgtaaaacttcttttaaacacaattttgcgatcctaacagtggctccattggtttcctcgcgaaattgtctaccgaaagcacccattagaatttaaaatgtgacgaaataaacatcaaaatttgcagtctttgtcgaaagttccatgtcttcgatccactgtgcgccggcaggttttacggtgtttagctttgttaaattcttgattttccggctccacagtatttcctttgctggccaggagtttttagggtggaatgttcaccggcgctcctgcatatacccgcgagacgaacagtctggtccgaacggagtttttttttcgttgaaagttctcgttcaaaccattctccgttcggatcattaattgttccagacacgactaacttttcaatagcttgccacttcttaccccaaaaaaaggaaatagacgaacgtccatacaaccgtgatagggaagagagccgtagtgcagaaatgaagttttgagaatcaaaggggcttatagtatagctttgaaacggataattttattgagaatagcctctgttcatcgtcaaattgccaccaattagccgaaagacgcttagaaatcgtttagatgattgtaaatcgaccaatttttttcaattagacaagaaggaatactcgtattattttattttattaatattcatttttatgttaggccagtgttaggcaagacagtcgtgagtgctatctcctacacgcatttgtaattacaatttggacacaaaacgaacaaattttcaggttagatatttgcgcacttacggctttctcatgtgtctcctttcataaaaataagacgaacattgctgtgttagctacgaggatttcatccaaatgacagggttgccactgtcagggaaataccggaaaatatcaaggaatttttaaaagtcaggggaaacctggaaatgttagggaaaatgacgaaaatgtaagggaaaaatcgtcaaatcacctttatttgctttctcgggtgggtgtgacgtttcgaacagctcattttgcctgaaatctatttccaactatgtttttttcgaaaatttggcatttaatcaactgtcacgaaattgcaccaaaatgttttagggaaatcaggaagaaggtcagggactttaattttcaaaattccgtggtaactctgaaaggagattagacaaattttaaaggaaactcgatttcgaaaatttaacaatggagatgttgcacgtgtgaggaatttgcaatttaactgttgattcttacgtaaaagttcgcgagaaacacgatggtgcatgccactggttttctctgaaatcaactcccaagctcaaaaaaagctctcaagttgaggccaaaatggagcggatatcccacgctatcctgagagtccacctctacatcaagacgaactctccatgcaaaaggtagggagcaaatacattagcagggttgctgtgttttcagttttggagtctccaaataaagtggcagccctgtcaatgtatttgttccctatctttgcatggagagttcgtcttgatgtagcggtggactctcaggatagcgtgggatatcccttccatgttggcctcaacttgagagctttttttgagcttgggagttgatttcagagaaaaccagtggcaccatcgtgtttctcgcgaacttttacatgagaatcaatagtaaaattgcaaattcctcacacgtgcaacatctccattgtcaaattttcgaaatcgagtttcctttaatttgtctgatctcctttcagggttaccacagaattttgaaaattaaagtccttgacatataggaatatgtcaaggactttcagggaaatcaggagatttccctgatacatttcggtgtttctcgcgaacttttacataggcatctacagtcaaatcgcaaattcctcacacatgcaacatctccatcacggctctcctcgccatcacgtcagcatagcacaggccaaaacttcgtcggggatcggagacttggcaagagcgctctcccctagcgccccttccttccgtcccaatacgttggcattaaagagccccggacgtgtaagatcgtaaatgggttactcggatgaagcggagagcggaagcggccgatccggcagcgccgggctcaaagttaacagggtcgcccggccggccctaatgacggaagcggggaagttggaaagcggcgaggaggtcaaatgaatatggatggcgcgagtggtattggtggatgcagctttgagctttcgccgggccagaggtcggtcggtcggtcggtcgggctgcacaggtggtataccctccccggcgccaccccgccccgccccgccgaaatgaagttagctctagtctaacactttcactcaattgaatcgcttgttttccaaaggggtcacgtccatttttccgcgagcccccgagcgcgttaaacaccctcgagccaggactcatccggcgaaggggttgctccctttcggggacaactgattcaattgaaaatgtgattgggatcggaacttgcccgcgaagtcgcccctgctttctttgaccccccccccccccgctccgtcacgctgctcgcgagcgcttcaaagagcttttattgtctttgttttctgtttgtttggagagaccccctcccccctggccgtccccttccttgtcgtcgacagcagacattgttcccgcgaaagcttcgcctttcgagcgcaatttgtttcacacctctgcgcggcgaggtccgcggcgcccttgacgcgcgctttttcattacggaagttgcgcgctccgaattgcgctttaattaatcccattagccgacgggttggtttgcggcgcgtgtcgcggggacatgttcgggcggttgagtctcctggattagcggggtggatgatgcaatcggagaaaatggaccttacgtgaatgaaaatatggatgatgggcctgttgcaaggtgcaaggatttgagaattcgtcaccctccgggcaaattagcacaagcgccatgccacgttacacaatttccgccgtcattttatttttttgcagagaaattgttggttgaatctctctgagaaacagctatggcttatcaattgaatcagtgagttcgaaaacacaccaactcggattttttcggttttcactttgctacggtttagtaacacttatagataggaccatctgcgcgccaaaggaaatttcgaaattccaatcggaagtgctcgaaacagcgacgggaaaagggaaaaatcgaagtatttcattggaaataccaattttcggccatttcaagggaaacgggcatcggcggttctagaccttcatgcttggggatgcccagaggtggaaaatgtcggagaccggccccgaaggggacggtcaatcaggagaggcctaagtttcggccctcaagttttgaccttttcctaccctcctttttctttttctctccttcctctctacttaaatacctataaattcaatgtagaaaatttttagcaaaactttccatcaaaactacaatcttaccataaaaaaacagtagaatttttgtaaaacacggctatcaatattaattctgtttaaaacattttcaattaattgctgggattttttctcagtgtgagcgaatacagaatctttaaaagcagcaatttcacggttctgataaccatacttaatttttgcttgggggtgcccggcacccactggcacccccgtagaaccgcctatggaaacgggtgaccatcccattatgcggtttccttttttcggttcagtataccttgtaccaacaagttatataaatattcaagcgttattcaggtcggaaaatataaatttttcagggcagactatggaaaatcagtatttgaaagtcggtgagaatgaaaacacaccaactcggaaatttttaaacgcttaattctccgtcatcaaacatggtgtctcgatttcaacttggtgctttacaaagtctctaaggacttgtcctttggcaccgaaaaggtttttattaaactaacttcttcgcccgctgcgcagttttaggtgcttcttgaacaattttttttttttttccgagttggtgtgttttcaaacccactgattcaattagtggttcatatggaacactactaatagtagtaaaggcaacatatacttgttagttagttatttcatttatagacattcagcatcctaggctattaacgtctttatagcacatacaccttagtgatggtatacataccttagtatgatacgagataccttagtatggttcacagaccgagagccattcgttcattaatgactattaacggtgtcccatttgaatcactaattgttttataaagccatacatttctctccgtgctgtttagaaagttcactgagttttattggcagcacaaagaaaattctgtgaaattttcggacagcttcgtggaacaatttctctgtaaaacaattaaattatgacggaaatttttaaacgtcgcatagcgcttgtgatactttggccggaaggtgacgaattggactgcattttgcaatttggagctataaattctaactcatctgaaaaaaacttatgtgcatagggaaactaatagcacatacgttgttttgaaactgggtcgaaatttatagttcttaattgcaaaatgtagtccaattgatgactcattccaaactcaaaaaaagctgtttccggaaccgacccactcaaaacgatcacttttacgcgtgaacggatcggtacactcgtgacgtcagagcgtgtgacaaacctggtctcctttccaaaaggctgccaatttctcgtggaaaaatgcattataaacggccaaataccaggtttagcatgtgctgtgacgtcacgagtgtaccgagtcccgcgtaaaagtgaccgttttgacaatacgaattttggggcgtttttaagttaattttttgagagtatccggtcgttaaaaaactctgaaaaaattcctgtgacattaggatccttggttcttccgatacaagtaaaaaaaattgtgcagcaggccgattggatacatacagtgaaaaatagtaaccggctttttttttgtggtatcggaagtcagggccggatttgggtggcggcaaattttgcaattttttcaaatgtaggtatcgaaaagaaatcgcactgagaaaaaaagtacaataatttataccgaggagtacggtgcgcagtaatacggttacctgcaccgtactctcggtcatgtgaaccgcagggtgcgggagtgcgaaccgagcnggggggggggagagatgattccaaattcccctcaatagaagacaatatcccatgtatcctctgggagggatgcaaaaatccctgttggtcttagcaggaccaacggggatttttgcatctcttccagagggtacataggatcttttcctctattgagggaaatttggaatcatctctccctctcccctttcattaaatatctcgacattatgtattaatgggcaccctagcccccccccctccccacgagaaaaaacacggcagtcaggagtaccaaaaatgggcactccctactagcgtgcggtagcgaaaaacgcgccagctaccctgccggagcccccccccctcctgccccagcagctacgtcacatcgccctacccttaccggcgcacccctaaaaacgtcggtaacgcaaaccgcaccaccccggttgtgcaaatcgcagttcggtagcaggaaccgagagttcggtaccctgaatcgggaatctcggtaccccgaaccgagaagtctggtagtagctaccgaggatatactgtagtgtaaaccgaaacattcggtgttcaatatcggccgtactgtgcggtacgtgctaacgcactgcggttctcctgaccgtactttttttctcagtgcggactcagaaaaaaattaccaacgagaaatggcgacaaaatctctcatttcctgggagttaaagtatattaatttctaatttgttcgcctgtcagagataagagatagcaccttttattagtctaattgagagagaaatcaaacacgtaacttgggctggagcggcgcggcgcagagagcaatgatgacgaggacttgagatgaaaaggagaagccctcggcgcgtcggcatgaaacatattagcgcctacaagtctttatgaatacttcatgcattgcgtcaaacctagtgcggtcagatgcggttggcgtgaaacgcatagcgcctacaagactgcatgaatacttcacgcattgcgtgaaatacagtgcacttggcacggtggcggaaattaaagttattaaaccacattcatgtttactctttcataattttttcgttcatgtcttacaaatgatatgtcttgtccgctcagagatcggtttacggaacttaactttcgcgcaaagttccgtgaaattttgctagtgttgacacagctttcacaaaaaataagcccagcacgagtaaacgcgtcttatcaacccctctttttcaggcacattcacttgatggttcgtaaagtaacctgaatgtgtagtaacattttttgattggtatttcattgggtcacattaaccaaatctttgggttgcattgaccaaatctttaggttgaaaatttgcaacctcgttaaaaatcaggtgcggatcgaccaatgatcgcgtcaatgatagtccatgcgttagccccttgcaagttgcaaccttcaggctctaagtgacatcaagagaagcaagaatctctaggtaatctacggttgcgctggactgaacccaaaaatttagtcgattaaaaaaatcattttgattcatttcaccgaagaggagtaatgaaaagtttaataatctcaccatcgatatgtgattgtctacagaaaaacgcacattagctcaaacggtaaaattggtagagctatttttgtcaaggtgtaaggaaaaacgcattctcagatttcaagcggaaagtctctctattgtcgtaactaacgagatgcgcttagtttagttcattcttacagtatttacagataatacttccatgcactaattcagtattgtttattttgcagatttgactgatttcaagtcaagaatatcacccaaaacactggcaatatgaggagatgaacatggatcttatttgaggtagtaaaacttgaaagctggctgtactcaaccgattgcagttggtaaggattcactgatcttttcctcgtctgtgaattattttttttttttttttttttttttttttttttttttttgcctgcccttatttaaaggaaaagtagctttcacaggagttatagagggagttgaaaaatgtcgttaaatgtatttttaataatcgataaacaaggctaacaacaaggaaaacactaattctaataaaatgagaatcgctaaaatttacaaaactcaaaacttttcctacttaattatttgaacgaacgtcgttttggagagtttgtcacccttcttcttgagcgcagatagcgtgacgtatatttaaagttcaattttgcaaaagatataccccgtatatctgttaaaccccgcgtcggccaggaaagttagattacattttgcaacaatgcagtactaacactggctcatccagtacgtgtatccatcaggggcggactggtagtcgaaaagttaggaggcgacctaaatgtgggggcccctcctgtcgttcgggggcccctctaagaaggtccgggggccctcccccgaaaaattttgaaaatttcacactttataaacgcaattttaagcattattggcgttggattctatagtacttgaacttcaaaatatcccattctcaggattcttgggggtcccttcataacataagctttaggcgacctttcatgtctcttagagacaaattttcaaggatttcggggccttttagtgactgagaaggataggaaaattacaacattacgggggaaaaaaacgatgactcgaaaaaaattcgccgcgggggccccttcgggacctccgcgggtaattgttaggaggcgatcgcctccccgcccccatggccagtccgcccctggtatccattaaataacctatctgtaaagggaaagcgagggcaaacgtgttgtctctaaattgagcgagaagtaatagttccatatttacacagtggtggacacctcaccagttgtcacaaaagtcagcgcaccttcaattttttgggtatgcgatacggtcatccatcaagtgcgaatagttgtatctaggtgttcgcccaatcagactatgttcttaaaaaagaaacgaacacctctggctcatccacaaagcaccttaatttcttgagacttaaaacttgaagtccaagtttctttatcttcaaagttcctttttgcacaatctagttcatttattgttcccagaataaggagaaagattcaggattgttgttgacagccccgattgatttatattgtatctataaccaaaacttttgcacttattaagctttcggatggaatgacatgatgaggttattatttaattcaggaaaaatcacatcctaattttagagttattgtggaaccttcacataaacgatggaagtcttcaagaggaattttcgccaaaattttatgggatttttgccatattatgttttgaaatggactgattcttttatcaaataacgacagaggctcagtatatacctacaaagcagtggcgtggcgtgctttgcaatgcatcaattgatctgccttaataatcgattctttaccatagttttgaatggaaaaaatcgatgatcgattattcatgccacgccactgctacaaaggtcgtatgaatttttcacagttcagagaggtgttgaaaaaaaaaagaaacccaccgacgtacctaccatttcacagtgtcaaaactgatcacgtcaccattatttccaactgccatgccagcctgcgtgtccaagctagagtgagttttcagaggaaaaaaacaaggtcagcgaaaaattactcaacccgttatttcttttggggaaaatgaacaaataaaaatggtgcctaagccgcatgcaaaggtaacatcgaggtctggtttatgtttcttgcaacgagctgagtttacggtccgttgtaaggaacagcattcgcgtgaccatgccaattcttcccggctgaaacagaaccgcgcaactaccacagaaaatgtacggagccacgcgtggtttcgttcagcgaggaagaacaccgtgcacttgaagcctcacataaaagaaaaggcgaatgcaggcttcgaacaagcgcgataaaacacgtgaattcagctctcttttcatctcggtttctgcccagccggaaaaattccatcaggagagtatacttttaagcgttccaaggattaagtagagtcaacctctttcgaaaaaaaagtcgtatgcaatgtctaagcaatttaagataatagaaaacgactatagagaagaaaatctgtactacgatcaccttacttaataatctaatacgtcactccgctgaacctgactccagttctttctgagacatggaaagtaatcaagtgagataaaaagcaaggctcattttaaagtttagccaagcaacaaaactcgatcgtccgcagctaaaaaagacttatgtactgtgaacttctgcttcctcctcctcttctccttctcttccttttcacttatcccccttttttctttattcttctcacttcttcttactgaccaaaaaatccactgctagaggagtgtccagtaaacattttgatcagaaaccgtcctaatctgtgaaaccaaaccgaagttatgacggttgtaatttgtagttgcaaaacgtagttattcggaaaatactattaataatgtattctactatgtctgaggatttgtgatgttgattctatgcatattttcgctctacctctaaagaaaaaaaagtatgcctaagtaatcacgactattttgagattataaagaattttactaccgtgaaattgcaaaaagtcattcagtttcgttttaaaaaaaattctttcctaaaaatgtcgtcacctcgcactaggtccttttcagggagtagttttggaagaccggagataaatctaagatatattcttgcgagaaaaaaaccatgaccaggccatcctcaaaaaagtaaaatgtgataggagatttgcaacgttgcgaactgagataagtggaatctatactataagctccaagacctcctaattttgcgaaactggtaacgcttagttccagcgttctaccgggccgattttcatgatttttgcggctatcgacggacaattgtctctagacaagccaactcttttcagattttcaaaatatggcccaggtttttttataatacgtggtaaagttgcgaattctcccatttaaacaatgtaaatttatactttttgtcatagttcgtttgagcgttctaccgggccgatttccatgctttttgcgtaaatcgacaggtaattggctctagatgagcccgctttaatcagattttggaaaaaggacccaggtttttttaaaatcacgttataaaagtgactgagtttacagaatgctccggtactgctaccgctatgcgcgggaggatgcgcagtggtcgaggaggttgcgcagtagctgtgtagcctgcgcatcagctctacacttatctacacaagattcgcacctgcgaccttaagtcgagaggtggctgagtcgtctaagacgtcgaatgcgtcctctgtgaactcggtgcgggttcgatccccgactcatgtaatctaaattattacttgactttaccattgttcattgttttactgcaataattcatcaagcagtcattccaaaacgcgtccttttaatttcaaagtaattttaagtaaagtttaaaattaaagtataccttatatcgtaattttttagggtaaaaataaaactaacactgataggagggtaaaaatagggccgcgaagcggcccattgatggcgcggagcgccttcagggggttgggccgcgtagcggccagggggcgtagccccctaatgatagtctattcgtcagtatacttttccatcgagtagatttctgtttgctagagcggtacttttgcgtatgtgcgcgcgtgctcagtgctgaaaggaacttttagcgcacattacaatacaacatgcacaaatatctgcaacattcgcgatcctgcatcctgatttaagaaagcgctcgagcttaatgtatcactatcatatgcgctgaggatatttctacaccgcctttttaatgcaagcatctgagatccacgacagcaagcgggtaatttgagtataaattctggttgaggctgggacataattcttcgcaaatagcttttcagtagtttcaaaagctgcagcagctgtgttgctcatatttattgacaaagagaacaaataaaacttttcgctgcgattgtgcgccggatggcgtcgccttaaactaccgtgtttctatcaaaaggaactatatccatctcgagatgggccctctcaagcatgtattcatatcgatctcaggtcccatgtcacgataagggtgatttctttttatttgaatacgttcaaataagattgagacgtaagggaaaagcaagtaaataaaatcaaaaggaactatgttgtatgtaaatcctattcacatactcctttttggcacaagtaatatagctactgtttcatgcctactgagatggcatctcgaggccgttcagagtccatcatttcgaaacggctttggtctctcgatggaaaggggttgaataccaaaactgccgtgctaaggaaaacgccgtatgaactttcgagagttgccaaatttccttcgataaaatgtttcttttttgaggaaatttatgaatattttcccaagaaattttcaagagcttaaggtaaagttgcgaacaaaattatcagaaaaattggaagaaaaatatttataaattttcctggaaattcgtgatttacgaaaggaaatttggcaacgccttaaagttcacacggcgttttttcttagcgcggcagactaccaaaagaggcatcgcacctctcaggaaatgcataatccattgtgcaaacattcggtattaacttgaataaagattattatggcgagagtcgcataaagatatggttgaagcgcgtgttttttgcaagataaaaattcagcgcagtgtcagttttccattgctatgacatgagcttggaacttaaatcataatatacccgtgaaaatgtcactggattagtgatactcgatgggtacttatagtgaggcacgacgaattgaggcatttggtgcagaaaaggcacttcttggttgcggtacattttttagaatctccacttctaatttacattttagggggaaaccattgggtcaattttttgaaatttatagttttcagaatcgtgaaatcagaaagaaaatccagtaaaatttttcgcagattccatgcatttgctataatgttagtggatgaaacttggacgaatatcctgagacaccgcaatctttaagtaatgccttttctgcacccagcgcttctattgcagttgaccattcaaatgaattttctccgcaataacacagaatttagctatcgatacaagagttatggaaatgttttatttttgttttaaatgtttaaaacgtccaagaatttcgaagcgtaccgaaatatagcgttttaaatcttccagtcgccaaagagcgtatagtgtgtggggggggggggggagattatttgaaattttattctaccttgatccgggtactcatgtcagaattctaatactttacgccttctattggcacaaaaataactaaacatcaatctattcatgactacactagaaagaatttccgtctacatcgagaggtccaatttctctgccctacttaataagaacttcgatttttcgggcatccttgagtgataagaactttactgaaaatttggctaggtggattagggtcccttttctgtgaatgttgttacgatggtgaaagtcacaacgtgtattccgattgcgatgtttcaaaatgtttacgttttctttattttttcaagaaatgacgatgtactcattttaaaaaaactaaatccgtaggattcttctctcagaatgcacgatttattaaaaactccaaacaatgacacagacctaatgtacataattttattcaaggcaatgaggcaagattcaagaaaaatggtttttaatctaattttagctccaaatatgaacattttatctgttttttctcatcactcaaggatgcccgaaaaagtttttccggacagccagaattatctgaggaaaactgatgagtaatggagagtatctaaggtagttctttggcttcagaagccattttctaccttcttttataggcccagaacaaacgggaaagattcacaggtaatatgggttaaatttcgtcattttgccgaggaatattttttactctatatcaggaaaagcgagaaaaattttcaggcgtcatatagatttgtgattttagttgataaatccagaaatagcgtccattttccctagcatgcaatagtcttcctttttaattaaatttttcctcgaaaaatcctgtttttttggaatacatccattccctgaaaagtgctgaagtgatgaggaaaaacggattcaatctcggatttcacggaatcaatctcggattcaattctaaatataggcatcgcttttcctgctctctgactcattttttatgtagatctgtagctgttttctgtccattgatttttctcggatgaaataaatgtgacaaaaaatctgcgacgtcgcaaatcgaaattcgtgttttgtgactttcaccagcgataaatgcattgaacattgcaggccgttttaggcccaaatgatcgtgtgctattttcggaaaaatcatcttgagcaagtgcggctcgtgatatcaaaacgttcaaaagttgacaatgacccccctcccatcatcaaaaacgagtacaaagtgcaaccattttagggtcctaaggcttctattgaagtttgaggggcaccacgtccgtactccttctaccaagttacttactctactctggcccatccagaaatttttgtatagagtacgtagagtgcatacatagggtcgtaataagaatggaggagctggcaccatttttaagcattttccggtcaccgaatgccatgactcccgtgcggtatcgggtcaccatttcgatacattttcgattgttttcgatacacgggtatccgaccatccgatgtagagtgagtgcctgtatatcgagagtatagacaggcgtaagactccgaaaatccatcaggccttcaccgatgcctctgcgaataaacttagggcccgaaagggtagctaacctatgaattcaaattatccagaacgatttattattacaattgtaatggttcgacacttgtaatgcacgtatttgacttagatttgcataaatttactcatttttacggaagaacgcacatttacgaacattcttagccatcttggtttggattggaatcagaagattgacagttaaaatttgtgtgttataaggccggctgcccttttgggccctaaagccctctataaagcgagcagtccatactctcgctatacagatcctctaatccgatgtaaacaaaggagatatgactttacgtattttacatcgccattttggatataaaatgtatcgaaagagtgacctaatctcggcgcacaccgggctcggaactcgtcgtccagagcatggccccctcctcacttcattaaattacgaccctacgtactcttaatttttggcgtgatgttaagtgtttgtttaatttctgaccggcaggaaggattatgatgggcgggttgatgttagcagaggtatggctcgtgacatcgatccttgtcgtcctttcagcaggcaagtcgcttttgcgccacgctcgccaccaactggatcctcccgcatccaacatggacttcgatcacctccctctcagagcctcgcctgagactgaccaactccgcaacccaaggcgagtaatgatatcatccttttagtcctggatagacgatcaaattacgagctttgtggcgattaggcgtcgcacagcgccaaagagcgctataaaagcgactttttatatatatatatatatatatatatatatatatatatatatatatatatatatatatatatatatatatatatatatacacacgatcaaattccgaaccaattctgatcaaagtagacatgctgatgactggtggtcaccatctaccatcaaattttgacgggccgcacttttttgttcaaagtaagatcagaacggagtgccaccattcatcatttcttgccacaggaaacatttctgccaggttttcatttataaatgaagcaaattaatgagtttgagactgatgactcccgacactttgatgctactttgatcggaattgtttcggtaatttgatattctatgtagggcttttcttgcgaaaaattcaaacttaaacacaaaccgattgcggtggacggtcgggtcgtaagacagtatgttggaagtttttagctaacgtccgttaaaaattcagcataaagtcgaaaaactcaatgcagagggaaatagctcactcacaagcagaattttacctaaaagagatacactgtttggtgcaacaccagtaacaaccattcaggaaggcaactgccgacgcgtttcagccttattgggccaatccccagtgcagcgcagcctcctgaatgtcctacaatcgagtgtgctgttgagttgttcggctttatactgaatttttaacgcacgttggctaaaaacttccaacatactgtcaaacttaaacctgcatttgagacaagttgtccccatgttttaatgttaattccttttcagggaagattcgcatttagtggcattcatctttggcgctgtagctctatgacctcctcccctcctcctccctttttgggggaggaggacctcttcaaagttattattttatgatgaaaggatacttgaagcgccaaggatcaaaagctgtaatctccattccattgtccaaaaatgaggcagctgttttaatgtgtttaattttttaagaggagtaattaataagacttcgtacgcagaatagtgtcataattttctagataaaatgtagaaaattgttgaggaagtaggcgaacagaaacgcacctgctctcttcttttaaaaatgtcccgtgggtactcatggatttcccataggatttttaaaggaactcaaggggatccatgggaacccacagagatcaaattttttgaccacgtgatggagatttgatccaatgcgcctaacttatacctaatattctaaaaagttattcagaagtcattgattttcatagaaattgaccgcgttaaccaagccacgtcagctgttgccaaacttaattaggcaatttaattttttacatgaaaacggttgtgcggatttgtgtgcaaatacgagggcattttctgcattgtacgaggcacgttaatccgcagaaatatatctaaaaaaattaaattgcccaatcgaattcggcaatagcaagatgtggcttcgttcgctgtctaaattgatgtaatggaggattagacaattaaaggcttgggccgtttttaaattttcctttttaatttcagacatgggtttggatttcgagacgggatcagcgacgaagggctcaattttcgacactcggaacacgaaggagagaggagcaagtacaaaggagctgaggcggaggaagagatgatggcggacgaaggggacaatgatccgctcgtggttcagacgacgaaaggcaaagttcgaggcaccacgctcaccgcagcaacaggcaaacaggtcgatgcctggctcggcataccttacgcacaaaaaccaatcggtgagttggatccggttgaattaaaacgagcaaagtttggtggaaaacgaggggtctgcttattggagggattggtcattatttcctgaggcaagagaccctccgttgctatcttggcaatggagatgttgcatgtgtgaggaatttgcgatttgactgttgattcctatgtgaaagttcgcgagaaacacgatggtcccaccggttttctctgaaatcaactcccaagctcaaaaaaagctctcaagttgaggccaaaatggaggggatatcccactctaccctgagagtccacctctacatcaagacaaactctccgtgcaaagatagggagcaaatacattgacaaggctgccgctttatttggggactccaaaactgaaaacacggcatcactgctaatgcatttactccctatctttgcatggagagtttgtcttgatgtagaggagaactcacgggatagcgtgggatatcccctccattttggcctcaacttgagagcttattttgagcttgggagttgatttcagagaaaaccagtggcaccatcgtgtttctcgcgaacttttacacaggaatcaacagtcaaatcgcaaattcctcacacatgcaacatctccattaaaacgagcaaagtttggtggaaaacaaggggtctgctccttggagggattggtcattatttcctgagacaagagaccctccgttgctactctggcaatggcgcacagtggatcgagtctatacgagagatcagactacatttagaaacttcaaacgcttatatctccatttttacaaaccttttgaggttctaaaggtagcagactcttttatcagactcggtccggaataacttactgatggtttagattcacgataaaaaacccgggggtcttttttccctcacagcagtaattagccggggacgtaacaggaaatttgcaccagtggcgagcattggcggatccagcaatttggcaacaccggatttcctccattcaaacatatggaaatgtatcgatccttggaggggccaggtgctctgatgagaatcgattatttagcgtagatttcaatggaggaaattcggcgttgcaaaattcctggatccgcctctggtggcgaggcgtaaatgatcgataatcgacagtttcccatttgaagctatgataaataatcgattattagggtgttcgttgcgaacaccctgtttataaatccttttccataggtttaaatgacagatcaatcgatgtatctcaaagcatgcctatgatttgcactgtgtgggagagagatggataaaattttctcatacggggctttcaggaaagtatttttaagaagaaaccctgaaagtaacatataacggttttggaggagtgggtggaaatccagatctgaggggcggagcttcagatttctaggacgcctacatctggccacgccacggctgtgactaatttgccactttacaccagttttttatgaaagtagaacaggaaatatgatcgaaagattttttttgctccgaattgatgtcagtctagatttaaaaaaaaaaaatctttttacctacttcactatgaaaaaaaaatcggtttgaaaaaaatccgctttgaagaccaaaaaattgacaacttcatgcgatatttcctctattagaacttccgtaagcagaaaaaaattctcaccatttgcacagtcgcgcaagaggaatggatgagggaaggggtaatggcaacacgtttggagtccacacgtcaatcacatttcaacaaccttaccatatctgtaaagatagagattttggggccgttttaaatcaaattacgtcattttttctccgcgtacgagcatggccagcacaagaaattcatttttcaacctcgccctagctgcgcggagttgaaaactgactccgttttttagtctcatcataaatatcataaatttcgagtgaggtaaccagtgaaagttgttactcagtctatttaagagcttcataagtaattgtaaggaaaattttactccctttagtgctttgccttatatgctaaaggtacagaggcaaagcactacgatctattctgagtactcaggcaaaaggccgttttcagtaaaggcatgcatgtagaatttggaagttattgctggttatattttttcactgctggattttgttttttccgtttttttctggctctgtttgtcacaacctaaaggctattcatgaataaccggggagcgtaaacagttaagcgccgtattcccatcctaaggaaaaccggcgtatgaaccttcaggtgttgcgatattcctttcaataaaatacgaatgtgctgggaaaaccgttgctacgagtatttttattaatatttttcagacaagcttgtttgcgattttatctaaattatctgaaaaattcaaggattaatatgcataacttgccccaaaaattcatgttttatccaggaaaatatggcaactctcgaatgtccatacggcgttcttcctcagcacagcagagaagtgtttcccttttccttcagcctagccaggaacacacttcactgctttccttactgcgtgtctctcatcctgtcgagttcgccttcaataattatgatggcaacttgagcgacttgagagcacgaatagttaattgcgtggaataatttcgctaatttttttcagtccggcaaggaacacatatactaacaatatttcgccaatgtcgctctcctctgctccctaattgttgttatcccaccatataaccaaaaatcatctgaaagacggcttttattctaatttttttcctaccatgaagttcttgcaccacaataaatgtttccctgaattgcctctaatggagactttgcagaaatcagatgtgaatttcatatttcagaagaaactattgcgtgagctgagcataatagtatcattttgtttctaaaataaacattcaccagatgtgatattaccaaaccaaggcggcagatttttttaattttaaatacacttttctacaatgttccgtatgtgaaaaaaatcatgaaaaaaactccgaacgcagctcattaagcactcacaggtgcagcgataaaatttttagtgcaaattttccatcacagtctaagccatatggtgcccagtggtgtcgcgtgaattgcgatgtatcgattgtcgtgccatttaaacctatggtaaagaatcgattattaaggtgttcgctgcgaacaccctgtctatcaatcattttccataggtttaaatggcataacaatcgatatatcgcaaagcacgccacgccactgctggtgccgtgaagaagagctatgactaaaaaacgactagagatacgacccagcgggctgattatcgaaatcgatcgataaagctatagacaaagaaggtatagttagtatggaacatttctattggttgagatgggtggtctttatagaacaagggaaaacatgatggactatctatatggtctctcgtggtttgccgttagttaatctattacctactttcgtcgtccatcacaaaagccagcttccgttaatcctccatatctcttttcagggttgccaccgtcaggaaactttggggaaactgggaaacgtcagggaatttaaaaaagttagggacaacctgaatctgttagggaaaatgacgaaaatgtcaggggaaatgacaaaaatgtcggggaaaatgacgaaaatgtcaggggaaactctgtacgtcacttttatttgctttttagaatgggtttgacgtttcgaacgacaaattttgcctgaaaactatttcaaaccatttattcatttaaacatttattctcgattcataataaaatcttcttgacggcatactgaagaatgtttccgcccaactcgaatcacatttttctctaataaaattcaaaaattatgctaaacgttattaaatacggatactagaaatgagtgagcttttgaacttccactctctttttgtgccgtagtatcttgatttattttgcgatgaaaaatcccgactcttataggatgcctgtcattctcgatacgttgtagagccttcaatttcgtatgatactgtgtaacacctttgttgcgaagtagttgcttgaagcaccgcggcgcggcggacgagagcgaacagcgcgacacgcgcataggcgcctacaaacctaacagggatacttcacgcattgcgcaatgcgtgaagtatccctgttaggtttgtaggcgccagtgcccgtgtcgcgctgacagcacgccgcactatggtccacagactggatttaacggaactttatcagaaaatgcaatggaccgtaataaaaggtgatggatcttatgatttttgggtcgctgatatcatttgaacttctgagtttaacaaaatattaacatcctgaccgaggaacttgacttcaaatgtgatttctggcgcttttaagactaaagatttcctccctttttctaacgatcaagaatatgcataaaaaaatgacaaaaatgtctcccggtcgaaattaggtgatttatacataatttgaggcggtaaatccgaatatgacctccgtttttgtccatcacctttcaatttcccggaatagccaattatacccggaaaaatgggcattttttgtgttcttgcgactgttaacccctgcatcatgtaggtaagaaaatgttcaggtacaaaataaaactatctaaattagtatcttgatttattttgcgaagaaagctctgcactcagaaaggatacctttcattcttaatgaaatgtcagggaatttcattttctaaattctatgtggcaataccctgcctttttttctctttgtctatagctttgtctatcagtgtcaataatcggcccgctgggtgttagcatagagaaacaaaaggaggtgtttgaatcttgacgaatacttaccccgtgacgtaggtcggtgcaacatggccagcaaaatctggaattcgaagtatgaaaaacggaccataacgtccgatttttttgctgaaatcaactcatgatataacttctaacactttaacactacactaacactttacactttaacactaacactttatgtcgaatgacttccaaacctgtccctaaaccacaccatttccaagaaaatcgatgataaaaatcgtccgtaccgacctacgtcatcaaaacaatccgagatgcccgaaatgcccgaaaacctccttttctttctctatgaggtgttacatccccacctcttaccggtcctgcagactgattattgaaattgatagacaaagcgatagacaaagaagacatagggagtatggagcgatcccattggttgcaactggtggttcttacagaccaagagggacaatattggaccaactgttgggtctcttgtcggtcgccgttagtcagtctattacttacctcctttgtccattgcaaccatccgcttccacccataagatctcatcatattccttttctcttctttctctatagctttgtctatcaatttcaacgctggtggtttcaacgccggcttttcaacgcttttcccgctggtggttcttacagaccaagagggaaaatgatggactctttttcgggtctcttgtcggtcgccgttagttagtctattacttacctcctttgtccattgcaactctccgcttccacccataagatcccatcatatcccttttctcttctttgtctatctatttcaataaccggcccggtgattccatactaatcaggaagaatcctgtttcaggggcactgcggttccggcacccgcggccgatcgacaagtgggaggggatcctgaacgcgaccaagatgcccaactcgtgcacgcagatcgtggatacggtcttcggcgacttcgccggctcggccatgtggaacccgaacacgcccatgtccgaggactgcctctacatcaacgtcatcaccccgaagccccggccccgcaacgccgccgtcatggtctggatcttcggcggcggcttctacaccgggacggccaccctcgacatctacgactacaagatcctcgcctccgaggagaacgtcatcctcgtctccatgcagtaccgcatcacctgcctcggcttcctctacttcgacacccaggacgtccccggcaacgcggggctcttcgaccagttgatggccctccagtggatcaggaacaatatccacgccttcggcgggaacccgcacaatatcacgctcttcggcgagtcggctggggcggtgtccgtctccatgcacctcctctcgccgctgagtaggaacttgttcagccaggcgatcatggagtccgggtcggcgacggcgccttgggccatcatctcccgccaggagtccatcatccgcggtctccgcctcgccgaggctgtcggctgccctcacacgcgcgcgcagatccctgaggctatcgagtgcctccgaaaggtatagtataatcaaatatgatgctaatatgaatataccggaagtacactggaaaaaaaacacattggatctagagtccagactcttaaaaacattgacaagaaaaagtactgttgattcaatcagaatctagcttaaattaagaaccaagcctcttaatttaagcggatttcgttttgattcaagcaaaaaaccgattgaatcgagagtattttttcttgtcaatgttttcaagagtctggactctagatccaatgcggtttttttccagtgtaagtccgcaatcacatatctcgttagcggtgtctgaaaatctccgcctctatgttattttttcaaaggagaacaaattgacatcattccttgaagtttttgcaaaattttcttcgcattgagaagaaaaatcatgacagttttaaagaattgccgttgagtagttttccatttaaaaaataaagtatgacaggaagtctgcgacgtcgcaaaccgagtaatgtgattgccgacttataccgtcgatatggacctggaccgcgttaaacagaaaggaaccaagccacatcagctattgccatatttggacggagttaaacagaaaggaaccaagccacatcgggatcgaaccgagaaaaagaggtttaaagtttgactcctgcataagactcaatgtaaaagataaacttcaagttcgatttctgcaaaatttgttccaacaaaaactttgaatttttggcgatagatagtagagcagtggttgagttcaaaatcactcataactcaattttttccaaaatgtgggttggttcctttctgcttaactcagtccatttaatcgggcaatttaactttttacatgaaaacggttgtacggatttttgtgcaaatttctatgaattttttccataacacaaagcaaattccttaaaatgttcaaaggaatccgcacaaacactctctcgtaaaaaatcaaattcctctgttaaatttggcaatggctgatgtggtttggttcttttctgtttaacgcggttcatatctcgtttgcggtgtctgaaaatctctgcctctacgttattttttaaaggagaacaaattggcatcattccttgaaggttttgctgaatttttttcgcttcgagaggacaaatcacggcagttttaaggaatcgccgttgagtagttttccgtttaaaaaatgaagtatgacaggaagtctgcgacgtcgcaaaccgagtaatgttatatccgactttgaccgtaaaagtgttccctcttccaaggtaaaaaaaaatctggaatggagaatttgtaggtgtctgaaatttgatgaatttcgtatttaagtggaaactaccgattgaactgaacacagagaatacccgcggttcgtaaattaaacaattagtggaggagatatgacaaaatgatccattctgctaaatacatgcgtttaaatgggaaaacccgccagatgacgtcacgaagcggtttatttttcttttaattttatttttatgctgttccccatattagaaaaaaagttaaaaaatactgcgaaatcagctattcaagcacttccagatgaagcaataaaaaatttgcatgcaaattctctatctctacatttttatttttatttttattttttttttgcttgaagaccactgtgtatcgtttcagagatatgcagatttatgtgttactgaagaacctttgagattcagtagttttctatcacctcgcacttactcctccaattcatgtattgtaatatattcttgtaataagttagcgagagacgcaatagcccgaatgcagacaacaataaaaacacactaaaatacaaaaaacaaatgggtatacaaggctatggaggataaataaacaaccaggacgttttgggccaattacatgcccattctcaactggaaaagaagctaaaaaatgtaaaaattaaaacaagaaaatgagcatgcaactgaccgaggtaggaatcagtgcaagtatattcaagtatatagtattagtagtatattcttgtaaggccttgtccacacgaacgcggttcgcggaactcagttcgaggaacttgttcccggaacaagttttttgctgagctgaaacttattcctccaaaacctggaatttcccccgtgctccgagcttctaaatatgtttcttttgatgtgaatttgcttgtttttgtttttcacgtcctttacatatgatcttgacatttatttttgttactttggcggtcataataatctattattttgcaataattgtatagttttattgaagttccggttccagttcggacgaacccgtggggacagcatgcctcatttcaaggaataagttccgggaactgagcaagttcgaggaataagttccgcgaactgcgctcgtgtggacaaggcctaatgtatttgattctaatcttgtatcgtgataacaacaggtcaacgcgagcgtgctcgtggagaacgagagcgggaccctagggatctgcgacttcccgttcgtgccggtcgtggacggctccttcctggacgagatgccgtccaagtccctggcgacgaagaacttcaagaagaccaacatcctcatggggagcaacacggaggaggggaactactggatcatgtactacctgacggacctcttccggaaggaggagaacatccacgtctcccgcgaccagttcatccaggcggtgtccgagctcaacccgtacaacttcatcgtgcggcgcgccatcatcttcgagtacacggactggctgaacccggacgacccggtgaagaaccgcgacgcgctggacaagatcgtcggcgacttccacttcacgtgcaacgtcaacgagttcgcgtaccggtacgcggagacgggcaacaccgtgtacatgtactacttcaagcacaggtccacgagcagtccgtggcccacctggtcgggcgccctccacggcgacgagatcaactacatcttcggcgagccgctcaacccgaccaagaagtaccagccggccgaggtggagctcgccaagcggatgatgcgctactgggccaacttcgccaaaactgggtgagtccataattcacatttgaacagagacaaggaaccctccactagtatcttggccattgtggaagcctttactttcgggacttcagcactccactgttgacttacctacgtggttgatgttcaacaacgtgttggcagtttcgttttgcaaacaagccgaaaatggccgacgtttgggaaaggtgtttggctcatgacgtcatccgaagctcatcatcgaccatttagataagtcaacagccgaaactagggtgatgactgttgctccctagtaattgtccataaggaattgttgaaaccccgaaagtaaaagcttccatctgtcgctaggaggccagtggagggtctcttgtctctgcatttgagccgcatttacaagatgtctaccagtccccaaaagtccccaatgtccccgattatccccgattttggaagggtatccttgatatccccgaaagtccccaattgtcttgttcaggccccccaaaaatgacaaaggtcgttctaaacaccgtcattttcaaattttccgaccagttgcaacggcgcggtatgaccaagaatataaaaactgaagtgttgcttggtttttcgtatgttttcatcggttcaacataacttgtaaaattagtcgtataaaatacgccctttaacgctctaactagctccctttcacttactattttgggggaaaaaagtccccaattttcttgaaaaaacacccctaaaagtccccgaaagtgctcaattttggttttttataactggtagacactctggtttaccaagaagaaaccaagccacatcagctattgccaaattaaactgggcaatttaattgcttacgagcgaaagtttgtgtggactgctcctttgaaatttaaagtaatatgcttcgcactatgcagaaaattcaccgaaatttccgagaaaaatttgcaaaaccgttttcacgaagaaacttaaattgcccaattaaatttggcaatggctgacgtggcttggctcctttctgcatagcgcggtccatttccacccactcattcatcccaaattaacctgttcgtacacggaaaaaaaaaattgctgattcaacaattcaattgctaaaaacagtgattgcaatgtttcaacgcagattttacgacaaaaaaatgctgttttaaccacattgtaaactaatttacccacgggggtggttaaagtagcatttttttgttgtaaaatctgcgttgaaacattgcactcactgtttttagcaattgaatcgttgaatcagcatttttttttccgtttattgaaaaactaggggttgtcctctgccgctacgcgatccagggttagcacagtgagagaacaccgggaaatgtcagggaattttaaaaagtcagggcaaacctggaactgtcagggaaaatgacgaaaatgctagggaaaaattgtaaagtcacctttatttgctctccagaccaggtttgacgtctcgaacaatagattttaagcgaaaactatttgaaatcatgtctttttaaccatctggcatatttacaatatccaaggaattgtgcaaagatgtgacagggaaatcaggaaatcgtcagggaatttcaatttcttcattctttggtaaccctggcggtcaaaccccttagtggtcgcttcgcgcccgctaagttgtggaacataactgtctcatctcgtcgctcctctgacgtaagggcgtatctagatttttgcgtgagccttagaaagcatagagttatacggagcacaggggtcacgtagaaatcaagttacgcccttccttacgtcagaggagcgacgatctatgacgcaccccaagtaacagtgatcgcgataagatgcgatttaatcggataacgtatcgcgattttatcgcgacgtcgatttatttcaatgtcatcggagcataatatgtcataatagcattaaattgcgatttcatcacatagatttgcagtaaaatcgcgattttatcgatggcaatttgtcgcaatattatcgaacaaaaaatcgtgataaattgagataaaatctcggtctcactaatcaacaatacgtcagtcctggcagaactcaatcagtgaaaacgtcgtctcctgaaaaactttccagtcgatgtcatccatcgctttagcacatctcagcctcatcaccaatccgcgtcaactgaaaatgcgtacatcgctcttagttcatagctcatgcatttgggagaggttggacttactttgttaaaagaaaacacgtggaaataaattgacttaaaaggaatcacacataaagcaaacctaatggacatagctatccttttgattttattaatttgcacatagtggcatctatggtaagtgcgttcggttcatcccctgctcagtggatggagtcgatgggagaggtcggacactatttggaaactttaaaagcttgtaactccgttcgtacaaaacgttgacgttttaaaagtgattctatcggtttcctcgtaagattttctgcgaaaagcaccccttaaaatgtatcatgtgacggatttaacatcaagatttgcatttttagtaaagaaatgtcgtgttcgatctctgtgattgattcgatccactgtgccccgtcacattgtagaggcgtcatcaccgtgattaattcgcagatttgttcgcagcctcgggatctgtatgaccgttttttgctgtaccgtgctgtaccaccacatcaagcaagagaggcaaagttttttacaatgtcaatttttcagtttgcctacgtgaaagcatgtttttttcgcaggcatgaaaacgtccacgcgttccctggcaatggaggttttcgagcccgaagctgaaggccttcgctcaacacgaactcaggtcaaatagattctgtccggcgttggggcccttctggggttatttttaagagctctggtagagccagctctttcgcaaaagagggaaacacggctaggaactgatgcgtaggcaaaatgacatcacctagatttttagtaggcaccagccttgcccgaattggtgtctagccctgcgagggtagggttggtacgtacctaaaatctaggtgtaatacattctaggccttagacctagtgtcgttttttccgtgcggactttccgaagaagttacataatagggatctattttgaacttttgaaaggcctctcacatgtgcattctgcgacatttctggagtgaactgttattgagccctctctaaccatttcaaaaggcaccttagctacaaaaccacaaacggagaaaatggtttgatgctcatgccaagagaggtgagttaaatatcattacctagatttgggtaggcacctgctctgctcggattgaagtctagtcatgtgactttaaagctggtccccacctaaaattaaggtgatgctgttctaggaccttagagcctatagtcgttttttccgtgtggtctaaaaattggcgtcgaaaactcactgccttcacgaaagcctaaatcagagacacagtcaatttgaaccgtcaccactctatcacgaataagaaatgcacccactaacgaagaaaagatacatttctaaactgagtagacaagaggaggaacaagctccaaaaactttgccgagatgtaggaatattcgatgagaaacgtcatttaaaatggaacgattcaaaaattgaggaacgcatagacatgatacattttttccaactttggggggaggggggtgggaggccatcaaacctccgagtataaacaatttctcccggtccctaagcattattacaattttcagggctcgcgaaagtcttgtctctattcgttggcccaacttaaagctcccaaaaaggaacaagtccccagaacttgcggccgaatgcggcccatatcaatcgcaaatcacaggatgattttttctgatcgattctaacatctggagcgtgcaagaggcaatacgctctattcctcgtcattactaattattgattttcgatagtgccactctaaaaacactctccgacatcggaaaatttcaaaattaccacacccataattttccttctaggaaaaactcaagattatatcacggatctggaggtttttggaggatgaatatagaaaatgagtgaggtgcaacccgagaaaatttcaaattttgtagctgatttgtaaatctctctaaaaaataaagtatgtacagcaaatatgtgcctaggtggctttgtagtttaacaattcttttatttaaaagtgcaccgtgaaataattacatccaacaattcacagtaacttacaactgaggggcttggagaacaaggcgtaaaagttcagtttttgctatttcaagaaatattgattgttctaagttctaaaattaaatggagccttaatatggcgaaagaaaagttcaaacgcacgttttgacgcttaaaaataggattttatcagtgattttctcacagaatatttttaaaactaattttaattgaactcattattatctcaatttgttaaaaactactcatatgtgctttttcctataagcctcttaactagtttaaaaataaatttcaatgagagagaaggatattggagttacattgcttaagatgacgggacacatttaacttgggcctaaaaatgttttgggaagttccccgaggaaggtaagtgatgaaagagctcgctcaccaaaatgacaaaaatcaactttgagaaaatcgtacactacggctaaaaaaatagaatacagagaaacgatcactatacgacgtgctttgacatcagaagcattaaattataaaggtatcacaaattcatctgtcctaaatatgtcatgaccctctccactaccttgttgttgagccggtgtgccatttgaacgcattgccacaagtgtataggtctgaatacacgatcaaattccgcaccaattatgatcaaagtagaccagttcatgactgatggtcaccaaacatcagtcctctttgatcaaaattagacgggccgtcaaattttgatcagaattgagtaccaccattcatcatttcctgccgcacgaaacatttctgctaagttttcattttaaaactaagcaaaatattgattttgagactgatgactcccgatactttgatggtaattggttcgggaatttgatcgtgtatcgagaatttatactagaatccaagacgccaggcgccaggttgaccctggtaaaaattggcgataggagctgcgtttcaaaataccataggaattcttatagccggctaaagaaggcaatagaaaaccatacagctggctgtagaaagcggagcaaaccatatagccgggctatacgaagcgataaaaaagtatacaaccgggctatagttcctgtcgccgggctttacactttatcgccatcggctataaaaggctataagatattgtgttgaaattcgtgtgctttggaaatcattaagtttgatacggaaccacaataatatttacaaaacacacattatattttcctttaatacatatttttttcatcacttaaaatgagaataatccttacaggatgtgcgaacatttcaaaatcatgagtttaaaaacgttgactccgcgagatcatatattggagcctaacacagagcggagcggcgtgctgtcagcgataagcgcgcattagcgcctacaaacctaacagggatacttcacgcattgcgcaatgcgtgaagtatccctgttaggtttgtaggcgctattgcgcttttcgcgctggctgcgcgcccgccgcgccgcagcgtgccacggcgttgaagcaactatttcacaccagagatattgcacagtatcatacgaaattgaaggcatacggaactttccgcgcaaaataaatcaagatactacggcccaaaaatagagcggtagtccaaaaactcactaagtcctagcatccgtaattagtaacatttagcatacacttccccctggctgttgcttaatcgccatcggctataaaaagctataagaaattgtgcagtcggctgtagaagctattgaaaatctaacagccggctttaggtctgtggtattttggaacacagattctactgccaatttttaccaggggaaataaaaaagcgctcccattctgccgctcttagaaagaacgccgtatgaacattcgagaattgccatatcaccttcgataaaatgtccgtttttggggaaagctacgaatacttaccagaaaaagttggtgacgtagccaacgtgcgtcagaaatcagcataaatctgcaaatctcaatacagacagaaaaaagctcatatgagcacaatttgctctgaaagagatgcgtgctgttaggtggaaaactagttaccattcaagacaattgagctcatatgagtttttttttcctccgtattgagatgtttagcttacgtcaggctacgtcaacaaccttttctgtataagtgcctcgtgcacctactgcaatcagtttgtgaatatttttccttgatattttcaggaattttagatgaaagcgcgagcaaaattatatgaaaattggaggaaatatactcataagtttacctggagattcgtattttatcaaaggaagtttggcaacgcctgagggttcacgcggcgtttttccgtagcacggcatcagcggctgagcaacttaaggttcagttggagtccttttatactgagagtaaagagagtacgaatccatttctgattgtttctcgtattttaggcctccacagtgtcatgccgcgatcacacgctgaatgtgggagctgaatgtggcttgaatgtggaagtcatcggcccgatgcctgaattttgcgcgtgacgcgcaaaattcagcaacgattctcagcaaccatcggactaatgttggatttgtctgaactattcgagtagatttgatacacatctggatgtaaatagctcaaatttgcgaaatttcagccgttgggcgatgactgttgacttccacattcagccgctaaattcagcgtgtgattgcggcatcacaaacgggaataaagattacattttcaccgatttcaaagagtataaactgaaacggaccggggaattggtggcacggcaaggaacaaacggaaaaacggaacgaggaaaggaacggagaccaggatttggggatgagttgatcaaagattacgaacaacgctcaatttacgcaatcttcattcccgtttgtgacatccatgagccgcgttgtcgtaactctccctataaaaggactccatgtctagcgcagagacaagagaccctgcactggtctcctagcgacaggtggaagattttactttcggggattcaacagttccttatggacaattattagggagcaacagtcatcacctcaatttcggctgttgacctacctacatggtcaatgatgagcttcgggtgacgtcatgagccaaacaagtttcgcaaacttcggccattttcgacttgtttgcaaaacgaaactgccaacacgttgttaaacatcaaccatgtgggtaagtcaacagtagaatgctgaagtcccgaaagtaaaagcttccacaatggccaagatactagtggagggtctcttgtctctggtctagcgactcattcaatgtccatacgtcgccattctgttgacgagattctgctgtgtcttgtacctggtgatgtacccggtgcactcggggaacgtcttctccttggggccaccgccgcctccgccgaagcatccaaaggctcccaagccgccgctacggctacccattttcaagtagcagttatatttgccgcctttctttttgcactctgccccaacggcgcccacgcactccggtttccaagaggcaccgagtgacctgtaggctgcaccggcggagacgcatcgttgaaaggccgtgttcctatcgtccggcgtcaccggctgggaatcccgggaggatcttgccgagccctgagaggaggttctgctcatgcttctctttttccgctgctggtactcgaggcaagggtccgtctggaccacatcgtacaccaaattcacccactccgctacctgcgcgtccgctgctggccaatgagcgcggtccgagaggcgccgcgcgctctgcgggcaggacagaggccaagcttagagtccctttataccgagagttaagacaatgtgcacggagaaaaaaaaactcgtgcgtgcgacccgaagtttaggtcatatggatctctgaagttttcagattgagcatctgaacactttaggtctagctgccgaggttcggatcacacatctgaaacttcagttcttacatctgaagtacttcggttctcacatccgaagtacttcggttctcacatctgaagtacttcagatgtatgaactgaagtttcagatgtatgatccgaacctcggcagctggacctaaagtgttcagatgctcaatctgaaaacttcagagatccatatgacctaaacttcgggttccacgcacgagttttttttctccgtgtgaatccatttctgattggttccagtattttaggcctccacagtgtcccaaacgggaatgaagattacattttcaccgattgcaaagataacaatatacacttgtaaaaaaaacctattggaccgatgccgcattgcattgacttaagggtacagtttcttgtcgccggatgtaagagtctggaactcttgtttcaagcggattttgcattgattcaagcggatttggcattgaaacaaagagtccagacccttaaatctggcgacaagaaactgcactcttgaaccaagaggttttttcttaccactgaggatgggccggggaataacgggttcggcaaggaacaaacggaatgagagcaggaacggagagaggaatttgagaatgagccgatcaaagtttacgaaaaactatcaatttgtgtaatctttatccccgtttgtgactccatgaggggggaggggggttgtcttaactctcagtataaagggactctagccaagcttagtgaaacgtaggtatgctctttccagagacaagagaccctccactggcctctcggcgacaggtggaagcttatactttcggggattcaacagttccgtatgggcaattaaacgagagcaacaatcatcactcttttttcggctgttgacctacctacatggtggatgatgagcttcgggtgacatcatgagccaaacaagtttcccaaacttcgccttgtttgcaaaacgaaactgccgacatgttgttgaacatcaactatgtaggtaagacaacatttcaatgttggagtcccgaaagtaaaagcttccgatagccgagacactagtggagggtctcttgtctctggctcttcccgaactcttccatagaataatggctaccagaagggtagcagtcggccgtctgtgctccgattcttggaatcccctgcacggcagcactaaaaaagtgaacaggataggacagggtaaaacctctgtcaaaaacttctcgatcatgcgactaaaaagtcgcgcttggctgcgtgcgtaaatgggagggtatcgataatgggctttgacatttggaaagcctgtctgaaagggcgtgcgcattattcgcggaatggagatgttgcatgtgtgagggatttacgatttgaccatggattctaatgtataagttcgcgagaaatacgatgatgccactggttttctctgaaatcatctcccaagctcaaaaaaagctctcaagttgaggccataatggaggggatatcccaccctaccctgagagtccacctctacatcaaaacaaactctccatgcaaagatagggagcaaatacattagcagggttgccactttctttggggactctaaaactgaaaacacggcaaccttaatgctaatgtatttgctccctatctttgcatggagagttagtcttgatgtagaggtagactctaagtatcaggactcttcattttggcctcagcttaagggctttttttgagcttgggagttgatttcagagaaaaccagtggcaccatcgtgtctctcgcgaacttttacataagaatcagtagttaaatcgcaaattcctcacacatgcaacatctccattgaggcaaaatttgcgtattttttcttctttttttgcgagatcgcgggtttgcacatgtagagtaaaaaaataggtcctaattttgacctgtacgaggataaaggggattttaaaataggagaatcgatttgaatgacgggaaggcgaaaatttgcttcaactatgggctaaagtacttaaatcgtttatccgtttgtcatgcaagaactccattacaggctgaaaattagatcctaaaactaatttagcctcggggctaaatagctaatagctaatttagctctagggggcctaatttaggtgggatttggctaacttttaaattctaagtgttaatcctaagtgtcatatatctaatgataaagttatatacatttaatacaatttctaacttttaaactaaaataaaatttacccatcaagtttagaaattatcagcttatctgtttacactgtaaaacacaccttcaacctaagatggaatgatataagtcaatcctgattgactgacagttcctgccaatttttgtagtcgattcttgtccacttttttccgtcatgggaggtaacataagaggttttccttcattaggatagctcaaaaaggatggaacatttacccgtcacattggaaacttcaaaagtgaactctctcaaaaaaattcacgcgtttcctgcgaagaatcaacttcttatcttgtcgcccatttcattactatcgtcatcctgaaaaattgcctcggtagattaaggtctcttttggtacggatgatcacttattaagctgtggcaaagtaacgaggtataaagttgtagagctaatactgtaattgagttaaatgttcaaggttgtgaggagtaatagattcaaaataaaaattaaatcttttgtttcaaaaaggactaatctgaaaaaaaattttaacctttaaggtggtgcgtatcttccattattcattcagtttttttctcccatttcacattaaaaagatctgcactttcgttcatactaaatggagaggtcttttagaactcagaatacatttttgccatgtttaaatatggcgaacaacctccaacttcatcgttcacattgtctttcaataccccctttgcacgaaaaacctttttcccgtattcacaattttgttcagcaactttttatgtttttttaaacattttgctcatcaaagttgagcccttttcaaaatgaatgataatgaataaattcagagatgaaatcacttttgaagcatttttagtgaacattgatttttattgagaattgcaaaagagtccaagaatcaaaggcacaacttattgcgcaaaagttcgggaggaggaaggcaagattctgaaaaaaatcgaagtagaacaaaatttctagagaaagggtcaaaacccctgtccgatttatgattcaactctgaacttactcatctccagaagaaatagggaaaatattgcattcaaaaagaagttgtacaagattaggacatattttctaaatcctaccagtcttcggtatagttctattctttttcaaattgaatacccctattgatcagttaccaggcattattctgccgtgctaaggaagaacgccgtatgaacacgcgggagttgccaaatttccgtcgataaaatttttatttttgaggaaagttctgaatattttgttttgaaattttcaagagcttaaggtaaaattacgaacaaaattacgcgaaaaattgggggaaaaaattcataagtttaccaggaaatttgcgttttatcggaaggaatttggcaacgcttgaaggttcatgcggcgtttctccttagcacagcagtattagagtttccttatgatcacacgtttgtatatttaaatcagttgattatttgagacgattacgtacctgtgacccagcaccagttaatgatctcacaagccgcctatttggcaaccatgacgacatacccctaacatcaagaaaaagtaggattattatgaacacagtaatatttcgagttacactaagtcccatttcaaaatatttccgaaacttgattctaacaaggccgaggattcactgagtttatcgagcgaggaactgaacttttaagtccgttgtgacatattttgaggcaacagaaaagaggaaagtaaggaatctttttttagaatgcttttacgatgatttttcaattgacatcggagagagagtacgtacatgagagacgacgcacactggatcgagtcaataggcaaaattggacaaaatttggaaactttaaacgcttataactccgtttatacacaattttgaagttctaaaagtagttccattggttttttcgtaaaatttccctcaagaaccacccctcaaagtttaaaatgtgacgaaaccaacataaaaatctgcagtttttgtcaaaaatttcatgtccaaccttgcgaattgaatcgatctactgtgcgacgtgcactcttttagctagcgtgaatagaggggaggggacgcttaaatgaaaaatgttgcgcagatggaatacagggtgagtcataagcttttgctgatctctctagcaaacagaaacgtacgccctaatagcagaacaaatttttgtttttctaaaaaaagtataaaaaacacatatcttttatctaaatggttgtttaatataaaaaaaacatgcaacgcttatattaaaaaaaaatcaaagctcagacctgaccataatatatgaaaaatgataaaagctagataaggtaatttttttatttttttatataacgcatgcatacgaaagtgttaaaagtgaacatttttatgtaactattatataaaaaaggtcatcattttcgttagcttttcgctagtttttagtatgtttgcgaaaaggtcacgaaaattatgacttttttttacataatggttacataaaaatgttcacttttaacactttcgtaatcgtatgcatgcgttatataaagaaaaattaactttcgcataaaatctttatcttttccttctatggttctgctactagggcgagttttaatttatttacaaataccgatcaaaccttgttgcgccaaattaaagtgggcctacagcacttggtattttgatgtttccctttgatttagcgtacggcaacgacacacgaggtgtccgaccattttcttataattctaaatcctaactgtcaacttgagtgtattgccggatgatggttatgagtctacgaagtagagtctgttttcattctgtttatcttcagagggagggatgtaacaagggacctacgcgacaaatttttcagctacccccaatccaagaaaagaaaatgcttccaaaatgtttatgccaaacagataccaatataagcaagcatccatcaaaattgcaagtagttaattttaagaatggcaggaaaattttggcacaccttgtgcgcaatatacaaagttatttggaaaattctacgtggcgctgtttttagtcgaccgaaatcgaaatctgagtaatgtaagctccatgtgccatggtcagcaacactttagtgcgtgttcacacgattttgagaggaaataagtaaacaattcgcgcgcgtgcctcgataaaatctatatcgttttcaaactgcagcagaaagactggcaaatgaactcaacgtcagagcgcaaaattctcatttacggattatttaaaaaaaacaaaatcataatggtaatttttttttaaaaaaaagcgggaaagttctaatactgtcgtattagaagagcgctcaggtgttagtaaatgtatttaatgaagaaaggacgtataaactccgtcgactcggctgggaagtggacttaaaacctcagctgatagcaaaaaaaggttaccaaggaaaccgtaaacgcatatttttgtttctcgaaaatgagctcaacgttgagctcatcaggcgcgttttttttaggcttcatttgagttcaacgatcaatttcgataagaattactctaccgctaagaaattttcttatagacaaacgatcgaaactacctgcgcattacgttaaaagcataaaatacagttttcacagctttatttattttaaaaatgccccccccccaaaagcctacacatcgatgagctggtgcgccatttaaacgcattagcactagtataatagtactcagaggcaagtcgaaatcaaaaagcgctgcctatcggctgagcgcttaaaaatctggctatatacttcgttgctgtgcgtgagcatttgaaattctgggtgttcctgaaatatcactcggtgaagcatacgaaaggtaatttcgtgtgagataaaccaaggatatatgttaacggatgcgtgtccaaatatttttaagatttcaaccgaatcgaccttttatgccggatcacggagcgtgcccatcattctattatcaaaaatcttccttgatttcatttaagtagtatttacctccacgtttattaaaaaacgtaatgtggcgttttggttcgttgaaatgatccctctgctcattgaactagagttcagcgggatgatagacaaagctattgtcaaagaagacaaagagaaaaagaaggatactattggtggaagctggtgattgcgatggacgaaggagttcataacaaccacccatttcaaccaatacgatcgctccattctttcgtcgtgtcctttgtctatagatttgtctatcaattttagtaatcagcccgcagttctgttaactgaaacaagtgattccctcaattgaaggcgcattccctatatcggcaagcattcactaactatttggttcgtataacagaggttcatctctccaaaacaggtgatttggtacccagtttgcatttttcaggggtcattctaaaattttgtgcagtgtgaattagagtagtgcgaatgaatttaacttcatcatatacgggtgttttttgttccagtaacccaagtttatcatcagacggaagttgggcatccgtgtactggcctcaacacacaacgtacggtcgggagttcttaacgttagacataaactccactgccatcggccaaggccctcgtttgcggcagtgcgccttttggaaaaaatacctgccccagctcatctccaccactagtaagtttatccttactttgctaccagtggcgaagtgtgagtgatcgattttcgatattcctcgggttccttggcaagcaaatattactgctcctgagccgtccacgttgcgtaccagcttattgaaggcgaaataatgagaatgagcgcgaaacatcgtgagtggaatagttaggtcgccactggaccggaactgaaactgtgtatgggctagttgcgctggtcacagaatcgtgttttggtgctctatttcttgtggatcagctaaaaataataacatcgatccgaacaacaacttctcacgttcgatatttaccgagatatcgccctttgaaaagtcgggtttttgacgtcatccaccgcggtagtgacaccctcggtttcttccaccttactttcgccagttggtgtgacacacatttgcaatggctactcaacgtaaaactcggacgaaagcaaggtggaagaaagcaagggtgtcactactgcggtgcggatgacatcgtaaaccgaatttttctaagcgtaatatctcggttaatggagatgttgcatgagtgagggatttgcgatttgaccattgattcctatgtaaaagttcgcgagaaatacgatggtgccgctggttttctctgaaatcatatcccaagctcgaaaaaagctctcaaagtgaggccaaaatggaggggatatcccaccctaccctgaaagtccacctgtacatcaaaacaaactctccatacatagagggagcaaatacattagcagtgatgccgtgttttcagtcttggagtccccaaataaagtgataaccctgctaatgtatttgcttcctatctttgcatggagagtttgttttgatgtagaggtggactctcagggcagggtgggatatcccctcaattttggcctcactttgagagcttttttgagcttgggaaatgatttcagagaaaaccagtggcattatcatgtttctcgcgaaattttacatgagaatcaatggtcaaatcgcaaatccctcacacatgcaacatctccatgttgaacgtagagagttgccgttcggaaaggtcccattacctttagctaatctacaagaatcgagcatcataacacgattctgtgaccagcgcaactgagcagtcgctcaaactgctgcaaacaactggtactactcctgagccgctcacattgcctaacaacttattgaaggcgaactagtgcgaatgagcgcaagaccatattcgataacggttcgatgtatagtttggttcaaaacacttgaacataacctctaaccaaactgtaaggatttaagttggaaaagatgaaaatgagacatttcctgacaatttcacttcgcattggcatttggtactcaaaagaataaaaaatctgtcacaaaagacccgttctcttagatttctgaatctacttttgaggctatgtttatgttttgaaccaatcgatatcgatacaatctcatccgtttgatgtatcaaatacgatctattgcaccatgtcactggaactgaagccgatgaaatactcaaattgctgtcagcaactatcacttttccagacagttgatgatgtcaaatacctcacaaaaaggacatgaccataggctatatctcagatggcacagaaattgggggggggggggctnnnnnnnnnnnnnnnnnnnnnnnnnnnnnnnnnnnnnnnnaaggaatttcggatttccccccccccccccccaaatgcctatgtgaactgcaatttttgttaaagctctcgaattttcggatgaacctcgatggcgtaagttcgcaatcacaaatctcgtttccctggtaaaaatttgcgataggagctgcgtttcaaaataccataggaattcttatagccgactaaaaaaggctattgaaaatcataaagctggctgtagaaagcggagcaaatcatatagccgggctatacgaagcgataaaaaagtatacagtcgaactatatttcctatcgccgggctttacactttatctccattggctataaaaggctataggaaattgtgtagaaattcctgtgctttggagatcattaagtttgatacggaactaccttaatatttacaaaacacacattatattttcctttaaaacattttttttttttcatcaattaaaacgagaatagttcatacagagtgtgcaaacatttcaaaatcatgaattgggaaacgctgactccgcgagattaaatatgagagcctaacacaaagcggagcggcgacgcactggcgcctacaaacctaacagggatacttcacgcattgcgcaatgcgtgaagtatccctgttaggtttgtaggcgccaatgcgcgttccgcgctggctgcccgcccgccgcgccgcagcgtgccacggcgtctgaagcaactatttcacaccggaggtattgcacagtatcataagaaattgaaggcgctccaacgtattaagaatgacaggcatcctccaaaagtacggagctttcctcgcaaaataaatcaagatactacggcacaaaaagagagcggtagtccaaaaactaactaagtcctagtatccgtaattagtaacgtttagcataaactttatcgtctgactgttgcttagtcgccatcggctataaaaggccataagaaattgtgttgccggctacagaagctattggaaatcttacagccggctttagatctatagtattttggaacacacattctaccgccaatttttaccagggttgaggtgtctgaaattctccacttctatgttattttttttaaaggagaacaaattgacatcattccttgaagtttatacagaattttcttcgcacagagaagaaaaatcactgcggttttaaagaattgccgatgagtagttttccgtgtaataaatcaagtatgccaggaagtctgcgacgtctcaaaccgagttatgtgattgtcgacttacaccgtcgatatgtcacattttttcctcaaaatgccaagaatcataccgttatgcaaagttaccgaaaggagggttaataggagagtttttttttatgtagctccaaaagctctggtcggatcctattttaaactctcttttttttgtcctaggttaccttgtccctgccaactcaagcaactgcaccagtgcagcgccaagttctctccttcaacatgggttcaataaattatccagtcattcgtcaccgttcatcctcctcctcgctgtctttcagtttctgctgctgcttctgtcgaacagtgccattttgtaaacaacgcaaccttttcctctgcaacggcttcatgtaatctggaaggaatttctcattatcgaaatcaagttttgccctgactcttgtttcttccccagctgaaaagcggaaaatagttccttcgaatagaataatctactgtgctttatgaatatgttttcaatgacttgattttcgcactattcctcgattactttgtccccatgatgaaacccagcatccattgagatcggatttctcgacactagtcaaatttgtgttattatttgaactgatttaggtacttatttttttatatttatagggtagatttaaaatagaaggggcagattattgtctctttttactacttgttttacaaacacattttttttataaatatgtgactattcctctctttttttgtgaagaaaaagaagttccacaggttatttgacagtcttgaattctacattcctgaattttgtgttcgttttctttgttatctatacttatctactcatcgctcagtttcgcattcgcttttcatccattgaacttatttcattttgttctatcaagttttgttgtatgaactcttgataagaggagtcgagaatggtctcacgaatgtcaatccttcttgcttgtgtctttcctgttgagttggttactttttaagctttgagaatttgataagaaaatgacctaagacagaaagtcaaagcaacttgtgattaatttcactcatgtgtagtttccgtatctgaaatttatgatgatatgacgtctaaatggttacggggtcattttgaatatagtttagtaatgcgactatcggcgtaagtgttggcttgaagtacaactcggtcgtgtttcatggtaatatcttgcacaaaatcaaaaattttgatataaaatatgatacctatcaatccaaacatagtgtcacgtcaatcatttctggaaacctcgctttatgggggacaaaaacaatgactggatgacctaattcttgatgtacgtccaaatcgggattattctaccctgttctcatcggtctgtgatgaacatcgatgacaaaaataaggaaatgcgtatctcttttgcaactttcagagatctgttaccttcttgttttttccgaaaagaaacaatccggagaacctccttttgaatttttttcggaaatgtttgtttgattaaagacgactcacagtaaattttgcgaaaaatgctttgttggttttctttaaggctgggcgaagatttatatcccccaatcggaggcttacgcatttttttaatatagccatcgatatgagagctgcactcccgttttttgcgaatcttcagcactatgtagaaaattttgattgtctatatcgatcgataatttctgcattttaggatatttcctaataaattccaagcaccatgtcacgctgtagaacatcaggcatttgcaccaaaaaaaccgtcatactactttacaacgtatgtatcaataacgagacctaaattcggtgcagtggcgtggcgtgctttgcgttctatcgattgatctgccatttgagtctataaaaaaggatcgataaacagggttgatgaacgaaaaccttaataatcgattctttaccatagattcaaaagggaaaatatcgatgatcaagtgcacgttcatgaatgatgacgtcttccattctcctcttctaagacgataatcctcgctaaaattaaatgtaaaaacaatactttcgtgcggcgagtttatcattatttgcttctcctttctcagatataacaatcagaacacgatcgttcgacacgtacactaacgtttggtctttttataatttgaaggtagttaggtaaataaaaatgcagcgaatcaaggaagtggcatgttttattcggtgtcatcctgacactgtattcctgaatgcaaaaatgatggaaaccatctgtttagcgttcattcgaaacattcattactgcggggacactttttatcgatcgtacaattcatttttaggctgttacgattctttgaagtcggtatgactggtttctctccattcaaaaccacatccattcaaagaagcgaaacatttcgttgccactttgcgagaatcgcccttgaaagttggcaactatattttccctccatttaaatgtaagtaaaacaatcgattcttggtgggacagcttttctcgcctataatcgatacttttaatagatttaaatagaggaaaaacaccgttgccaacttgcaaaatcgccaccgtactgcactcggttatgaggggaattttgtctgatagttattattcatgctcagaatagtttttaatttcttccaatgtacgaaaaagccaactactcgcacaatactcattgaatagtaaatcaggaggaaatcgcacaattttaagtaaagtgtacagaggaaattttctattttacgttaaaaattaaacatgcattagacattaaacagtatccgagtagaggacaaaataatattatgtatttaatgttcagaggaagcgtggaaaatttgatatgctggtgtggttaacagcgattgtaaacaactgaggcccttgagcaactgaatggcgtggcgtgaattgcgatacatcgatgtacctgtcatttaaacctgtggaaaaggatcgataaaaagggtgtttgcaacgaacatcttaataatcgatcttttaccatagcttcaaatggagaaataacgataatcgatctttcacgtctcgccactgactgaatatctctcaatcacgcccaattttgagggggtatttgatcagttaaacctcaccttcctgcataccaaattgaaaagttgccaagatgtattcatgtagatcgtattcgatagtggttcgatgtatcgtttggttccaaacagtagaacataacctcaaacaaaaattataagatctcatttggaaatgctgaaaataagaaaattcctaacaatttcacttttcattgccatttgggaccagaaagaagctatgtttacttgctgaaccaatcgatatcgatacaatctcacctgtttgatgtaccaaatacaatgtataggtcagtcattcccagaaccaaaattagaatcttctgcgcatgacgtcactgcgctggcgcgaaagctagagagctgggaatcaatgcttttctcatgagagaaggctaattttcattgatgaatcatttaaatatctttcttttaaaccttttaaagctttttgagagtcgaaaagaacgtccagacattagctttcagggttttgattcggccgaatttacgtttttataatttttaatgatttttgaagttagcgctgtacgagccattttgtggtatgaatctggcctgtaaaaatggctgatgcagagtcaactgtaaaaatgaaaaaaataacaaattcggcaaaatcgaaaccctgaatgctaatgtctaaacgttcctttcgacactcaaaaagtttcaaaggatttaaaagtaagcaattcaaatgattcgttaatacaaatcagtattctccaatgagaaaggcattgtttccaacattcctggtttttacggcagctatactagtggcgtggcgtgaattgcgatatatcgattgtaatgccatttaaacttatggtaaagaatcgattattagggtgttcgctgcgaacactgtgtttatcgatccttttccataggtttaaatggcataaaaatcaatatatcgcaattcatgccacgccactgagctatacctactgacgtcacgatccaatggacaaggacaaccccgagcgcaatgacagacctatatgtatagatcttgagatttgcatcaatgaagatgacccgctcttgcaggaaaccaacactgtacgactgtagccataatttttgggtcggactcgtgattttgtccacagacattttaattttccatgacctaggacggtccccttatggatgtcacgtgcttcgggaaaattctgtttttgattttcatcttttgtacagttttgatgttacccttcgttgtaagaaagtaagaatttctgttattggtggttattcatacttgtgtctgattagttatttgtttgtacagtattatagataaatttttctcgccaactctaaaaatttcctagggaatgttcattagatgctgctctctatgcctcacttgtatttaatcagaacaatgcggtctgtttccttgtatttactaagctaaacacctgatcatgcttcattgaattaggttagatagatttcaaaattatttctggttcttttccttttttctattatgttttgtcaatcagctcaaaagataaactacaaacttacaataggtttttcatgcggtggctctagaatattaaatgtttgtaacgcatttaattcaaatcgtttggatttattttctcagtaattttatctggattcacttttggttcatctatccgtctctgatttcaccctgatttgaaagcagataaatataccagatttaattcatcgtccacctcaccatgcaaataattgaattcttcgactattcatcgattatgacgattcttcgatcttacctcatctaagagaggaaaaaatcaaatggaccttaaaataaagtgcggccctcctattaacttggaagccttatattatcaatttaacattttttaaagctctcatattcttccgtacataagtctagatggccctctgtgcgcatgcatcagttacattcaggaacctacaatcctgatcggtaccatcatcatctttcaccttaaattctcaaagaaattcatccataattgataatgcttgcatgattgtatccaaaaatcattataattttcattccgtgcctatagcgttaatataaaacgtattgatacctacgtacggataagtcagaattttgataatcatggaaaaattccccgtttaatgcaggaatatggcatgagcatgcagtctggagagtggtctgaagaaaattgccgctacatttcaaactttaatttagctcaaagggctctttttctgaaagcgaagtaacaatctatttagtgttagttcaattgacctgcatgtaattatgagcaggtacttgatttatcataggtagcctactttcgagatggataaagccaaaaagtgtgatcatatgattttggaactaaatactgcgaagtattactaagtctcacatagactccctactcaacagagatttgtgatttttgctagttattagccgtagagttagtcttatcgtaacataaatatttgagctgaaccaaatttccgtaatgttaagtataataaaatggacccgcataatccgcagaagtgcttggcaaagcaagcacagtcttgatgttctatccctatttacttttctcttattcttcttcttattatatagttgtgttgatacttaaaaaaaacgtctaggtaaattttgttatcgttcgtagttttgatcatagatgggctgtgctagattatattgttcagagtttcttgggcatggacgaagaactcaatccatgggagtaggtctgtagacttcagatccagacaatgctattcatttatgcatactgtatagtttgacagtgttttgcggaggaagttgaaacatttcacgtcgtgacttgtgaggggttggtgagagtgcacctgagttgataattatcagtggcgaggcgtgaatgatcgattatcgatttgtccccatttgaagctgtggtgaagaatcgattattaaggtattcgttgcgaacattctgttatcgatccttctccataaattgaaacggcagatcaatcgatgtatcgcaaagcacgccacgccactgataactatttccgcattattcacatagcgtgagctttgaaggaacatcccttggtcacctgcttcttggaggcctcaaactgaactagtaatgtaatcgcacctgaacttataaaaaagtgtatctctttaaattcccctgttccctggaaatttctcttttcaaacttcgaatttcacgcatttctcccccattttttaccgaatatttgagattaatgttccgtaaattcataccattcaaccacagattttttcctttcctagcagcaatggtgtacattttaaggagagattttgtatgattaataaaaaataccatcaaatgagcgatgaagagagaaagtctatatcaacttttcaaaaattaaaaatacatcaataaaattggaaaaatgtagcatttctcgggggcttcagcaagagaattcttaataaaacatggttgtcaacagaaattgaaaatactgatcacttttttacgatttttactaatgaaaaatatctcaccttcatccgaaggaatgatctatttttgtgtgaaatctatttttcaaatgtctgctaataaggcaaacaagggacagtttccttgcgttatttcacatgtctccagtattttactgtttaaaaaaaaaaaaaaaaaaaaaaaaaaaaaaaaaaaaaaacttgcatttaaattaaaatctggcaaaaaattcatcgacaagtcgggcgggttaatatagattccaactgcccgataatcaatttttcagggggtttcattttttgttctcgggaaccattcaggtgcgacagtaaaaatcagtactagtttaccttatcggcacaatagaatcaggttaaggagtaagaaaaacacaacaactccctcagttatagtatcgcgtgcgaaaaaccccgaaccaagttcattataaatattggatgcaacttttcgaactccacggatatccgcgttgcatacgcccggaaatgaaggcgttttgacactctgtggatttcacgctttatccgcggtggtgaggcagtatttattaagaagatcgcagatggcggagagccttccattcttcgtttagatactaaaaagacgaaagtgcgaaaagctacgatacaaatcatgctcgcctaagatatgtatttgtagtatatgaatgaagaattgaaaacgatctatttatttcgatctgtccctactgccgtaattcaacttgcgagccgttgtaagatcatgcgccgtagtaaaattacatgtggttaaactatcatgtatgcatcacatctgtttaagcatacgctctgtatctgaccaagacctccctccttttcatttatcgtttttcgttttctttatacttagggtacagtggcgcggcgtgctttgcgctatatcgattgctatgccatttaaacctatggaaaacgatcgataaacagggtgttcgcagcgaacaccttaataatcgatattttaccataggtttaaacggcataacaatcgatatatcgcaattaacgccacgccactgttagggtaatgtgtagtttgccaacgatccacgtttttaatacggaactttcctccacgttgaggctgataaattctgtccaaaaacgttgtgccagtttttgcggtcaaataactcgggatcaacagcatcaatgccaacctcagtagcgaggcgtgattgatcgactatcgatattttcccatttgaagctacggtacagaatcgattattaatgtgttcgttgcgaacaccctgtttatcgatccttttccataggttaaaatggccgatcagtcgatatatcgccaagcactccacgccactggccaacttggtactcaaatgcggaagactccgaacgtagttacgtattttgaattttcctaggcctcgacataaccaactcgcttttgagcggaggtgcaaaggcgagtataaaaagaacggaacttttggaaaatgctaccaagagataaattgaaagatataacgggatttcaattgagaaataatttcgtaattagtgtatcgggatcattttgtcgtgacggagttggcattgtcagtcttatttgaccgcggaaaatcgcttgtcaattccattaaaaattagccagaatagcttcatctcttgttcttaactctctcaaacctttcgcatagaagaagatagtaacgtaagaactgaaagtaatcgttttctataaaataaagtatcatattcagtctcgaatactttggcttgattaggcacctacccatgttcatcattgtccagtccataacaaattacccagtggcgtggcatgctttacgatgtatcgattgatctgtcatttaagccaatggtaaaggatcgataaacagggtgttcgcaacaaacactttaataatcaattatttaccatagcttcgaatggggagatatcgataattgctcatacacgcctcgccgctggacttatccctggagaagcatcatgaagttcctcccagaattttctacaatcttgctcaaataactgactccaaagatacttatcctggaaaccaaatttttattgatatttggaaatttgaggtgtcctctgtttgtgttttaaaagagtaagtatccctaagataatttgatttatttgtcttccctaaatttatcagaagtctcctaactaaattttttatcattcagccaaatttcacttcacaaaatatatcgtgtccagccaaaatgatgtgtgactcaaatgatttttttagagaatatccattccacctactgttagtaagaatacgtgttttttatgaataaataattccttgaacgcaaaggaaaaaaggaataaaacttgataatcctttaatcggaatgcttagaattttgacgtaacccaagtccagtagcaaagctaaaaaatggatacatccgaaagttagtataaatgaagataaaaaattcggctgattgccatttcttttttcagttctttcgtaaaaaaaagtatcatccctcccctcgtatcgtggattccttcttctattaatttccctcagataaaattcggttgtacatggcaaaataattcttatttttttttcagttcatgaaaaccttattcgcaatttaaaatcaatttaggcccccaagttatcctccaagtcgatataacaaaaatttacaaaacgctttaattctacttagtagatgaaccgtaattataaatcaagtaaatgtgaaagcaggacaccattcatatgataattaaaaataggactaatctagtaaaaaagttaagtgcgtttccaaaattcattggaattatttcacgctgcacgttgcagatgagaggagtatacattaaagaatgtctagtctccttcacgcttcttttttgatttttctctgatatataaataataaaataggaatagcaacttttaagagtaagcctacagaagtgaaccaaaagatggatcttacacgcgtggagtaacaaagagtccttacatgcgtgttgcgtgttgtgatagagattagttccaagctttacataagaatctgtaaaaatgtcaacttacttgcatctatctctttgccttcgcgaatatttaacttttttaaagaaaccaataaaataatttaccaaaaaaatatgtagctagtacattccaacgtaccacttcaactaaataattcgaattacttctattaattataatgtttcagtagatctgtagagtcgctcactaatgatatctacttttagatgtttataagccattatgaaatcagacttttttacatatttgcaatgtttacatatcaacttgtttaataagatcattttttaaaccattcagtaactatttttagtatcctgtatagctaatttttatcatgatggtaatataaatatataaatatatcttgatgtataatttgtatatcaaaaataaaagcatacaaatttggaaaccaggcgaaaaa

SEQ ID NO: 23 - DNA, 86055 bp, Bemisia tabaci
  source 1..86055: mol_type = genomic DNA
tgtttttggcgcgagcgcgaagtgtcacggaacttagaggctgtgctgcacgtcttctgacgtctcgccccgataaatcggcttcgattggttctgcgtccacgagaggtctcttaatttcaagatgcccattaattatctgcaacgggctcttatacgtctccgctcggtaatgttttacccctacttttcttatttgtctatcagtcgattcttcatcaatcaatctcatttcattccgacctatcgtctctttcccttcagtgctgtttttcattatttcactcgcttgagatgccttgcacaagagctgacataacaagaatccaagtcttaatttcttgggggggggggaggtgtgtgaatcagaaattgatatggtgcatgaagttttataattggtatttttggtttcaattgattttgatcagttcaaatggtcgactttttggtggcgatcgctgtaagccccttcagatttcaaaatgccaacaaaatataatttctaaacatttcaaaaaatgcgtcgatgtgacctcgcaagtgcatcaaactagctcagcaaggttccgcttgaaaaatgatgagccgctttaagacttaataagtttcataccagtgactttttgttttagtttcaaaacaggctcactattctttttctgggacaaacgtgaaatcctcccatgaggagggggaggagaattcagcaacccgaagttcaaaatcaataccctcattttatatcaaattattttccaaaaatgctcatgaccgatggaaaaattcatctgtgaaaaatgtcactgaagcttttggtaaatatagtgaaaaatattacttgaaaaatcgaacttattgcgttgctggatggttaggagatcaacctaatccaagggggtaaagtggtagagaaagagagaagagataagagagagagagagagagagttgattcgataaatgcgcaagaggtcttgcaataagttgcttgcgaatgccacactgtcaatgttgaatcttttcaagaaacatcaagagaaagcagcggatccgagacaaggacgcgtgtacgtgagttaccgaaagtgcatcaattgaacgatgttagcagtcttaattacggaatccgagcagttctaattgccccctgcaaggagacagaactgctcttctgtcgtgagactggattcttccgtcctgaatactccacacctttcgacgaacattttgttattttgtttgccaggattctcatattccagaaattgctatcctcttcagaacccaatagacttcttttttgagagactgatttagacctttttttcagtgctttcatacttataggtaaatttaacacgacaaaactctgcagcgaattaaattggaagttaatttgtttggaagtggatgcattgcaggtggatgcaacgtcctgagcccatcggatcggattgacgcgaacatttcgtcgtctacctgacataagagcgtaacaacactctgcaatgaaccctgtcctccatacacttcaatgtttttccggactcatctcaatgtgtagttacgctctcatgtcatccaaacgacgatttgcttttttccggctcttcttgacgcaacggtaaagtcttgatcttatgataatctgcctaccgatagctcatcgggctcgttaatattgtcaatgagctgagaacgcatgcgcacaactcgttccggttcattgcgcctagggcccgatgcggtgcaccaagccggacctcgtgtacaccgtattgccgcactacggaaaagagccgtaaaagcagttccagatgagccgcgagacgcataatcgcatgggccgaccgcggctcatcccagaccgcaatcttccgtaagacggcagcgtaacaccccgatccattataaacccatttgcccgcgccatccgcatctcgtgcttccaaccgccgccgccagatcgcgctctatatccgccggatcgcattacgtgatgctccgagtaactgggcgacggcaacggtggttccggtcccacgaccggtcggggaggagagagtcgtggctgtcgcttcgcttcttgcgcgattcttccccctcgggtcgggttggctgttcttttcgggacggcaacactgcagccggcgatttcttcccgattcctagctaaaatcagcacccgctttagtcgtaacgaaggattcgcggtcgctcgtcggaaaccacgtggaacagtccttcgaccacgtggataccggtttttcccgccagttttttcgctcctcgaagttttcggttttccgcccttctttttactagattcactaaattatagtaaccggtgacgtgttccgaaagaggcacttcgaatagtgtgcgattttttctggtgtaaacgctctgtagcatctgcatatatagcattttgaaattggtccgtactgcgcggcctacatggaatttggaattggctgttgttctaaatcggtgttccttcctccgatttttggtaaacttgtcagtttattaaatcgatacatacattggctgtcttgaagtttctctcgtttcgctgcgttttctggcgtgggtgcgcgtgtggaaaaccaggagatagccgcttctttttgataggttcacgcaggattgcgatgattttggatttcacccgaactgtggggcgacttcgtagtcgggaatgaacagggtgagtatccaccaaaatcaattcattaattaattaacagcacccgttatgtgatatgcaaaatgggccactgcaggctgattgttcaaatttatagacaaagctatagacaaagaagacaaaagggatatggacggatcctattggtggaagtgagtggttgcaatggacaaaggaggtaagtaatagacttactaacggcaactcacgagagactcgatggttagcccatcattttctcacttaatctatgagaaccaaccatattaaccaatagaattgctccatactcccaatgtcttctttgtctattgctttgtctatcaatttcaataatcagctgcctgctattaaaacaagatattaagcactatgctgccgtgcaaaggaaaaacgtcgtatgaacctccagacgtagccaactttcatttgataatacacggaattcctggtaaatttaagaacatttttcctctaatttttcggataatattgttcgcaatttcacctgaaacacctgaaaatttcaaggaaaaatattcattactttccttaaaaatgaacgtttcatcgaaggaaatttggcaactctcgaatgttcatacggcgttcttccttagcacggaagtatgatagttggtttttttctcattggagctccacatcgaacaagtcggacgcattttaaatattcaaattcatttcatacactggaaaaaaagtctcgtagatccctcagtaccgtagtcccgtactcgtagtcccgtcagactcttaaaaagtttaacaagaagaaatacccttgatacatttgatttactcggatttttgcttgcctcttcatttaagcggatttcctttcgattcaagcaaaaattcgattgaatcaggagtattttttcttgtccaagttttaaaagtctggaatctgaatccatgtaatagaatagctataagtggcctatcaattattataccctattatttaattattaaacccgcttcgattggttgtcttttcggacaaaccatgtttgatacgtgaaatatgatgaagataattcaatcagtgagaacgaaaacacaccaactagaaaaaatgaaaataatcaagatgcatacaaaactacgcagaagttagtctaagaaacagattttggtgccttcaggcaagtacttaaggacacttttaatgtccaagtcggaacagatgcggtaacttcaatgccctttatgaaaattgactgtcttgaatgaaacgtgaccattttcgagttaccgagttggtgtgttttcgttctcgctgattcaattaggtgtcagcaaaggaaaaaacacaaacgcgctccttcaagtcaaccgctatgcaatttgagatacttgggcgtcgaaattgttacgttccgctcctcgcatgaagagcttacggtcgcgtttgtatccgtgtcgtggtgtacgatttctggagccggaaacgtgctctacatcggatcggcttatcccgagatctgaggtggtgatgccctcgtcttgaggacttcaaaagccggttgacactgttgacgagcaggaaattaatgggcccacggtgcctttaagcaggagtgcaaaggaaatgaaggtctggccgaccttttgagcgattgacgccgctcagccttgcacttgggagcgggaccgaaccgtgtgcccgtctttttgcaccccctccccctctcccgaacgcgatcgtttaattaaatctatttttgacgcgcgctatcgccgattgtttctatttttcgccaccaacagagctgccggttgtttgaattctttcaaaaagctaaattgtgcaccgcgtttaacagaaaggttccaagtcctatagctatcgccccttaagttggctatgtattttttcacgagagtaagtttgtgcggactcctttgagaattttaaggaatttgcttcgtgctatggaaaaaaatcaccgaaatttgcacgaaaatccgcacaaccgttttcgtgtacaaaatttgcatagtaggacttacaattttaattatagttcacagaagctcgcagttgaatatcatgcatgttctgagagcatcaggtgctttgaagtttttgggtcagcaaacgtggtttcaaaaaaaagctatttacaattttagtacattcggattaaaaaataaaagctccaaactatcatagtgcaactttatgctctttattggctgacaaaattaactaaactcttcccggcttgttctttgggaaatcaaagaaaagccacaagagggctctgttgtcctaatcgcacgatccaatgtctctacctgaatcggaagaaaatgccctatgtactgaaaattttgtgtagtgaaaatcataaagaccgtataagttacgcatgggtgaaccaaaaaatgaaagtctcgacggacaagtagacagaattaagagatctaaaggagcgtttgacgaagaaaaaaatcctctgcaatgttaaacgtgactttggttccgtttccatttaatttcttgtcatttttaaggctgccaaaaaattccagattgcgatactctcaaaaggtacccttttttgtaatacgacgattttcatccgtgaactgccaacatctcctcggctcagtctaatgaatctcaaatcttgtcccttgttgcttcgttcattcgcttggctgcattcttgttgtggataaaatatgaggagttgctcttaaaaaagttcattaatttaaacgtcaaccttagctgaataggactgccgtttgattgaaagctgaggctccagcgctaattcctgtacaaggctttaggcgtgtttttcatgtagagtaagtcacgcctaaagcttgaactagatcgtaagttcgacgaaacccttttgttgaacatgagttgttttcgaacgacaagtctttattttattatttcacacagcctcctattaattgaagcgatagatgtaataagatttgtaagaaatatttataagctttgaaaaactatagcagcacgcagggccgtatttacttccttgccgcccatgggccgcctgtattttgccgtccccttctcattcgttttgaaacatcaataagaaccatcaagtgaacgtgccggagggtgaggggttcataagacgcgtttactggtgttggacacattttttgcgagagccctgtcaacactatattagcaaaagttcacggaacttagtgtgaaagttatgttccgtaaacctatctctgtgtggacaaggcctatatgaaatgaacgtaaaaataatgacaagagaaacataaatgtggtttaataatttaaacttccaccgccgcgccgcgctgaccgctctgtgtttggcgcaatgcgtgaagtatccctacagtctgttatgcgatatgcgtttcacgccgaccgctgctgcacgcactgcgtttgacgcaatgcatgaagtattcatacagtcttgtaggcgctatgcgtttcacgccgcccgctgctgaccgcagcgaccgcactgtctttgacgcaatgcgtgaagtattcatgcagtcttgtaggcgctaatatgtgttacatgccgaccgccgcgccgcgccgaaggtttctccgtttcatcttaagttctcgtcatcattactctctgcgtcgggccattccagaccaaatttcgtgttcggtttctcccttagtcttaactcgactaattaaaggtgctgtctattgtatcacagaaagacgagtaaattcgaaatatgaggaatatatatcacaggaaatatatctcaggaaatgagaaattttgtcaccttttctcgtttgtaattttttttctgattccgatttttctttatagctacatttaaaaatattgcaaaatttgccgccccctaaatttgccgccatgggccgcggcccatgtcgccaccccctaaatccggccctggcagcacgcaaatagtaattttgctagcccataccaaacaagcatacacttaatatttattttcatggaggtgcgaatggaaaatgacgaaatttgaagaaaaaaattccagtaagacttattaaatgtttcagctccaaatgatacaccaagtagcacttgcaaagcttatacctgcttattgcaaatacctcttcactttcaaacattcttaagttgctggaatcttaagtttaaactcttcaacttaattaaattggatgaataaatgcttacagacttatctaaaaattccaatcttttgactttgccaccgattcctgggaaagctcaaaaaatatcatattaaatataaaaatcgcgagtaatttaattggaatattcatgttgcgaaattgcggagtgtgcaggcacgtgcaaatcagaaaattccgttgaatgaaattgataaaaatcaaatcatgagagtgttaaaaaattaatatttactctcagctctcccattacctatttggattatgcatgttcaaaagtatgtatgaaacaaaaaaatcgtgtgagctcgctaatgcttattaaaagagctcatcaatgaattttcagcgcgaggtcattaagtactcatcccgaaaacctcgaacctagagtcccatcgaacacatgcctcaatgcgaagccttgcgtcataaatgaacacacttgcgtagctccaaagggacacattacattatatttattctcgcagcatttcactacgtggaatgaaattatcgaggcggattgacggaaaaatttgattatggacgtgaagggaaagcgctgattgaaatggctcccgaacgatacctcttgtgtgtcggataaaaactactagtgatggaaaaattcaatttttcggcagtgccctccacgcgtgttatcaatcagcgttgtcaggtgtacgttgttacgggcgacgacgtggaaattcgccctgaagtgtcaatgccaacaaataagcaagtgcaaacttaaattttggctatcgaaaaaattgaatttaatatgaacgcttatttgtcgatggaaaagattaaattcaaagcaagagaattactcgatacaaaaaataattctatgactggaaaagaatcctccgattgagaattaattcagtttacccaagatgcagggatagaggccactaagaatagaaagatccagggaggcaaggccataatggtatagagcggattaaaatgattgcaagtgagatgaatttattcaaattcctaaataaaaaaataaataaaatagaaaattctccaccgattggactataaacatttcttaaaatattatgaaggtctgttctaaactttttatagagaaaccatgagcattgggccgctgctaaaatttcatacgacttcttttgacttggaggagaactctgaaaatatcgtcaccttttagctgcacagcataaatattatgactgatgagaaaagtaccgagaaataattatcagcggttgtctaattgcaaaaaaaaatacaacataatctaagtaattttgaaatgttctcggtttgtttttgcaagacgcagcagtccacgcgagttccctcctcgcaaatcacattcagctgaggggaactagcgcgaaattacagtgtttccaaaatcttgcaaccccctcctttatatttcctgtaaaaatactaaatatacgcacagtaataaaattggcacgatcgtttcctttgatattaattttttttcctcagaaaaataaaaccatatgttattttagatattttttcccgagatgtatgaacttcgcaacaccgtaatcgcatccgctcttcttccaaatacgatccatttggactactttttgcaacaaggaaccaatatatccggcctatccgtataagcacctatctgcacagggaaactcatggcacgtatgttgcttctcctaggccagaacgagtggctcctcattgcaaaatatagtccattgaacaattttttaaagagccaattacatgacatcaacgcatcgtgcagagccatgacccgatcaaaaatagacgaatttatgctaaaaggaactatgtgcataaggatcgcgtgtgacatagttccttttagcataaatacgtccaaatgaaggagtcaataatgtcgataccggtgaagcgacgatccgtccgcgaatctaatttccccgcggtcgcgccgccgaactgcctcgtaataaaatagctttgtgcccctgtgagtggcggaggcgggggagggggattattttttcccatcgaaaaagtgcgccgactttgattggattgatctcgggcgtcgagtttcgctccggcctaaattgaatttcggccggatttagccgtttcaaacggtcgacgggcccgcgtcgcgtcacacgaggcgacgccgcggaacatttgtaattgaaaattagtcagaccggaagtactgtattttgtgaaccaaataccattttttcgcttttgtcagtagtatttgcattgtaaaaaatcgaggagtgaatatcggtgcccaaaaaccccgaatgatatgaatgcgaagtgagattagcaccatggaagcgtatcgatggctaaggaacaatgccacctatctgtaaactgacgattttgcaggacaaagaagaaacgttgccatttttgtaattttgtggttggatttgcattttcttttcttttacattacagcttctctacagcgctaattggaaaaaaataaaaaaaaatcagcttgcatattcaacgctgaagaatgcggcacagtcgccacctcattatttctccataattttccgttaggaagaattgttccttagccctcgctatgacactccacaaaaagagtagattccactccgtaatagtgtaaatcactccacaaggagaatagattccactccgtatattcatatcactcgggctttatagacgctatggacgcaatacaggctccagcacagattttcacttcaatatttttaaaagtgtgccctatatttttgttgatttttaaatgactgaaatgtttaagaaaattctaccgaaaaaacccctcctttttcattgaagctggttatcttcccacactgaatcccgcccaagtcatgaaacctactcaagaaaaaagtttaaagtcgaagaagtgcagacactggaaagaaattctctcggatccagagtccagactcttaaaaaatgtgacaaggaaaaaactcttgattcaatcggatttttgcttgaatggaaggctaaacctcttgatttaaccgaatttccttttggttaaagcaaaaatccgattgaatcaagagtcttcttcttgtcaaattctttaagagtctggactctagattcaacagattttttttcgagtagacactctgtgacgacaccttgcaccctgaatgaccttgggctcatgccgaagattttcaaataatcatcagctcaggaagggttcgaacccggatccggttgatgtcctgatgaccactcggccacgcgccttcataagcccggacccgttgcaaggcgtaagcttgcgtcatttaaatgcaattaactctaattcactggcaccccctcgatttgccggacaatcgcctaatccgattcgcaaccattgcgtcatcgcgtgttggcgcgtttgcctagcaatcgctggaattctccgaaaaagtgtaacatggttgcgtcaatttagaaaatgtgaggggctgctaaaacagtacatcctcaagcttgtaactagtaaaaattgactttctgacagaaactaagtaaaaagatcttttcagaagacgcaatgggccagttgcgctggtaacagaatcgtgttttaatgcttgattcttgtagattagctaaacataagaagatcagcctaaacagcaactgtctacgttgaatattaacccagatatcgtactttgaaaagtcggagttttgacgtcatccaccgcggtagtgcataacgtggtatgtactaccgcggtggatgacgtcataaatcgagtttttcaaggcgagatatctcggttaatagtcaacgtagaaagtttcggtttgaacagatcttattatttttagttgatttgcaagaataaattatcaaaacacgattctgtgatcagcggaactgtcccattaaatttctgttggtcaaattttgacatgattctagttaacgttacatgtttttctcagaatggaccactagacaaggtacgaatttaagcgatctgatacatgtttcttaaccagaatttcacacaaaacacgattcacacaatgaaaattactaaaaccaactcctaacaaagatattaacgtttttatttcacattggttacgaggaattagaactgcccgctcacaagaaactcaaagctctacgtgagtctattcgcgcactacaacggtttcagcaagcttctcaaccgagcaatgttcatttcccaccatgtgttgttcaaactattagcaatttgctacagcttagctaaagcgtcaagattgaggttgctagatttttatattgcagagactgtaatgataacgttcagcgcgcgatgtgaatcacgttgagcattgagttttcatgagcaggtggttgaattcacgcatcaagaatcattaaatatcttcgtaaggagttaatttcggtaatttttgttgtgcgcatcgtgttctacgtgaaattttcgttacgaaacatctatcagaatgctgaaattcgtaccttgtctagtggtccattctgcaagaaaattgcgcggctggtaggattcaccactatggagctttacctgaaaaacacattatgaagtattaaatcaaaggattccaactcttagattatatcggagattcagaaacttggagtggatgtcgctgttcttactgagaccaagaaaaaagggcacgggtcagagaattacggtgactatgttctattctacagcggcgtagccaaagatcagcgtgctcagcaaggagtagcaatacttttgcggagaagcctacgtaagttcgtgggcacttgggaggccgtcaaccagcgcattatcaaaatgaaccttaacctnnnnnnnnnnnnnnnnnnnnnnnnnnnnnnnnnnnnnnnnnnnnnnnnnnnnnnnnnnnnnnnnnnnnnnnnnnnnnnnnnnnnnnnnnnnnnnnnnnnnnnnnnnnnnnnnnnnnnnnnnnnnnnnnnnnnnnnnnnnnnnnnnnnnnnnnnnnnnnnnnnnnnnnnnnnnnnnnnnnnnnnnnnnnnnnnnnnnnnnnnnnnnnnnnnnnnnnnnnnnnnnnnnnnnnnnnnnnnnnnnnnnnnnnnnnnnnnnnnnnnnnnnnnnnnnnnnnnnnnnnnnnnnnnnnnnnnnnnnnnnnnnnnnnnnnnnnnnnnnnnnnnnnnnnnnnnnnnnnnnnnnnnnnnnnnnnnnnnnnnnnnnnnnnnnnnnnnnnnnnnnnnnnnnnnnnnnnnnngacgttgacggttaaatatagattttttgtgctccttcatcatcggtcgtcatagctcaatcgttagggtgttaggttaggattaggtaggtccaggttcaatctcaagtaataggttgaaaatattctatcgtagtaaaataagttgaataaaataacaaaattcatatttttcatttttacaagttagcgttctcagatattcattttatagggctcctggccccctattttccattgaaagccccgaaaaattgtagcaatgaccgctgtccatcttggcaaaactaagcgggcatagtagccctcaaaatgggtcactttgacataattgctgagcgctgcggccgagcgctcgggttgatctaaccatctccgcagggctgacccagccgcgcggcatgaaggcagcgtcactacctgctggttgtcgatctagccaacaatttggttggcgcggttttcagctttcgaagatggtcgattcgaccatcttcatggctgcacgagacaaccttttttttccgtgatagaatactccatactccttatatcttttaagcctatatcgctttgtctatcaatttcaagaatcaccccgcaggatttcaatggatgctttggacgaaggtatcactgttatttcgttttcataagtgaagaataatcgaaagctcatccattatgttaactaattttgaagttgattggtacccgaaacctcgacaccttggagcgtcaaaagctgttgatgagcaatcgtgatacctagagtgataccactattcggtcacgtgtgagctcgggttgcctacactgaaaactgacggcaaaccgacagtgaggtaatcaccgcaccactccacacatcgctcggtgaattatttctattattttcgtgtaccaatcgtgtatgttaccttgctgtatagctgccaaacaaatcgaataataagtatgcagaatgaaatccacgccacattcccacgaaaagaagcagaatttcaagggttgctagagatgtttgatgtatacataaaatctaatagctagcactagatttttggaaaagcttattattcagctagtggacttatagcaggaaaacgcaccagaaatgtagctcgaactgtacgtgacaaggtgttaaatagtgctgggtccttaatgtcttgtgagaagagcaaggccaaaaaattccaaaaatttcaattagagtcaacaatttgagctcaaatttttcactctaattgaaatttgttgaccttgctttccccgcaaaatattaaggacccagtagctactatgttaccattttgttgaatgtgtaaccaaatgcatgattaaccctatcagaaatctacctcaagttgctaaatttcctgagattcatataaaactaagaatgtagaccttacaaatggactgcattttgcaatatggaactataaattctagcccggtttgaaaacaacgtatgtgccattagttttcctatgcacgtaagtgtttttccagaagagccagaatttacagttccaaattgcaaaatgtagtccagatatttcttttatccatgcatatcactcgccttgatcagctacaaataactctctcagagattactaacagtgcgtgtaatcgaagcgccgattttctcagaaagcctatgaataggcagcgagcttttgaacccgtgatttcgaattaacgcgtgcactttcgccccgacagtgctcccacgaaagcgcagctatatttgcggcctccaccctcacacactcccccgctcgacgctcggagcgcgtcatagagacgagtcgtcgcctcgagtcgaaaaaggcgcggctggcgcggcacggtgccatgaaattcgacgcctttgttgggctcgagcgccgagctttcggaagctcaaaagccgacgcagagaggcaagtgcccgccgaacgcggattaacccttccgatgtccctctctcgacaaaagcacgcatctgcgcctagaaacaaaccctgtcgtccgtatgactctatcctgctttgcgaggaatcgattaatctcctatttaaacgtatggaaaatggtcgattgtcggagtgaaccttgataatcgattctttactgtggcttcatatgagataatatcgatattcgataattcacgtggaaattgagttacgcggtttcgtatgtcgattctcgagcgagagcgggccggtaaacacgattcgcgaaatcggggagccgactggaaaggctaattagtacgctcgtgagccgcgctcacaatacccgcgctcctgtcctttgcaaaaacgccgtaagagcattccgatgttgtcgaatttctcccggttgataataggattcagaagggtggcatgaaacgtaagaaataaatggaagattgcaatttcagtgaaatgttccatgaaacttcacgaggctgtgaaatatttcatattctttaaaggctagaacacgcaacctacactcaaacacgcaaaaattgaggggaaaaaaaaacaatttttacattttgagaaacataaagaggagcaggtgtttttcaatacctttcataaatttctgaaatttcatgaaaatttgccatcctgggattaagagatccttgttcacttccagcttgttcatgatgaacttgaacttcttaatagagtttcaataatagagttgaagttatgaattcaaccttagagagtataacaccaatttgaattccgcagatctctaagcatttaccagagtaaacccctggtctgtcagccgtaaaaacaaaaatgtaaagatcaaaaatttccaaaagtctgataatctgtaaactttgattgttataactgtctacatagtttctatacccgaatattgcaaagaagttgattagaaattcagattcgtcacaataaaaattgagaggaaactttttgtagggacttcaaatacttcagagtaaattgcgaataaagttccctataaaattgacggacacatatccataacgatggccacagtacaaaaccatgcatctccatttgcgccggttcaggcttcttgtcatgctttatgttttctttggagaactattcaacgcagttatttgaaattgtcatcgatttatcttctctgttagcggaatattctgtacatcgatgatgaaactaccaaaccacttgtctcgatttgcagatttcctatcatactttttttaaaatgaaaaactgctcaacatcaatttttggcaattgaaaatgatttttcttctctatgcgaagaattctctgtgcaaacgtcaaggaatgatgtctctcttaaagaaataaaacgggagcggagatttttaacgccgcaaacgagatacctagtctggtagtttcaccgtcgatatatttcaagccatacagttggcttcgaaaaaataaaataggagctgaaactttggaacaccgcaatcgtaacttatcaaaggaaatgtggcaacgcctgaaggctcttacggcttttacggtcgccacatgctcatgccgcgagacctttgactcggctgttccggtaattgggtctgcgtaaaaaccgcacggcaaaaagagagtgcttcacatgttcgacggtcaattaagtgaggaattcggtcgatacatgccactggaacaagtggaattaggacagtaaaaaagcctggacaagcacgccatgacattaattaggaagcgtgagaatattacgtaacgctggacacatgcagggacaaacggccgaatttgcgttacggtacgatgaatggagggggaagcaggatggagggttcgtggtttacgtaacgattagtgtatggttagtatttgactcagactatctccaataccaaaattgagtcaaatttaagttgtaatctctattgtctataatttcactgggatcaggccgagtactcgtactggtgctgtcgtgctaaggaaaaacgccgtatgaaccttcaggcgtaaaacacgactttcccgataaacctttttctcttctaatttttcagataattttgttcacaatttcacctaaaattcctgaaaatttcaggggaaaatattcattaatttccgcaaaaataaacatttcagtgaaggaaatttcgcaactctcgaatgtatacgaagtttttcctttgcacgacaaagtggtccagaggtgttttctgcgctaaaagagccaaaaatacgagccaaaatcaccgcttcacgctaaacttcatggttgaaagtttagtggattatctgctttcttcctcgagtaatcgtgacatctgagagtgataccactattcggccacttgggcgctcgggttgcctaccctgaaaaagaaaggtaaaccgacagcgaggtagaatgagagagaattttatattctctgatatctcaaaattcaggtttgatcatggcgatagacttcattaagaaagctctcggctaagttcctttttcatgtatttatatcgcgtcatcacaatgatcatattgtgtttcattcaaaatcctttccttccaaatgagctttcactgacttttgataagccctctatcgcattccaaactctaaaacagctcagaactttcaacttgaaaatgtaaagctttggaagaataacaaccctgctggagacaatcagtcactaatgataaatagtgacttttatttttgaaacagtaaaccgcatgatgcaatcgttggatttagtcacagcctgttaaacacaatttttaaatacttttatcatttatttatttatttacttattttacatgagtactaaagagacccataattgggactatggcacatgtcaaagtatacacttagtcacaataagaattattagtaacgaaattgtaacttaaattttaaaatgcaacttaaattgtaatttcgcggatccgcgttgatgtcgggctcatagatttgcaactaaaatgctactcctcttcgctaaagagcaagatacgctctacttacctcgcagtcatctcgtggatgcgtcaagacaagacccgtcttgtttgtcagtttgtcgcttgtctcctttgccgcggcaaattacccattacgcaaagtaagtttcctcaaaataattggagagaataattattatgacgctgtaattaagctggatgtcaattacggagaggaatccgttgccccagtgacttaactgatttgcggctgatcccgcactcggctcaatttgatgagcggatgcggtccgggagggcgcacagtgggtcgcgtcaataggagaagtcggacaaaatttggaaattttaaacgcctataactccgtttatgcaaaactttgaggttctaaaagtggtactattggttttcttgtgatattttcttctcgaagcaccccctaaaatttaaaatgtgacgaaattaacatcaaattgtgaagtttttaggctacaatttcatgtccgacctctctgatggactcgatccactgtgcgacgacgacggtacaggggcagacgacttggaagacggatcacgcccgcccaaaatatgctaattttctgagaaaacgagggttctgtttcattgacatggaactatggaagtacagcgttttgctcagacatcgcggtgaaatatccgcggctaaatgcgtaaaagtcgatggcttaagtgtacgagaccacgtatctccaaattttttctcctattttatttttttgaaaaaaaaaacaagggaacttatcggcctgaaatgtatacagaatattctgcgaatagagagggaaaattaaggtagatttcaagaaattacggtaaatatttttccaaagaaaaaagaatgcaaggcaggaagtctccaacgtcgtaaatggtgatacgtgatttcgcactgtggccatcgacattcattgcaatccactgagtagctgacggatgtgaactgcaaaaacgcgtatttcgtttgcggtgtttcaaaatcttcgcttctattttattttatcaagggaggacaaaccaaccctatttcttaacatttgcacaggaaattctttggataaaaggacaaatgctgggaagtttaaaaaaaaaaaaaaaaaaaaaaaaaaaaaaaaaaaaaaaattgcatggtttcatttaggtgagaaataaatgttgaagggaagtctgcagtgtcgcaaactgtaatacgcgtttctccagtttaaacgtcggtaaaatgttaattttctgaagtacacaattattaaaaccatttcacaccattcaccaccattccatatcataccattttcatatttgtagcccacatagggatactagggggttggcgcttcgtccccgcttcaaccccactttcacatcgtaaggcatccgtaagggcactcttgatttccctcccccaaaatgccttacgttacttacggacggctaccaagtatgttacgtaacgtttgctagctccttcactccattcatactgatttgagtgctcttgcctcatgcacggcactcttacaagtctaactgcagctcaagcagcgtcgcagtgaaaggctgcgacagttgcatttagtcgatataatttaatgagggaacgtaatccatcgtctcggaggaaagatcattccgtacggtgtactatctcctttgatcattcttccgtcatcctccctgcctcgcagcttttcaaaatcacgcccattcaaagatcccgcttccgcgctgcctcgctccttcaatattcccgcctttaatctcgttcctccacactccgcggtaccagaaaattacggtaaaattacagaggcgcaatgctatttgcattccgtctaaccaacttgaacttggaatcgagtgctgtgattggcgtggttttccacgcacttgttagggatggatatatttagagacgtgactaagaacgggtacgtaggttgggagttccacgagtctggaccttccacactgtaaaaagaaagtggacgattcttgaatttgccgtcactagttttttctcccgcgattgatatttggtacaagacgaaaatatgcttgggacaaacgaaaaactaaagtgtaaactaagcagcataattttttattcgagacaaaatatttcttggcaaggcgtattaaaaacttctttttcagtgtatgacctgccatatcctccaagaaaagaaacaatattttccaatattttcaggaattgttggcctgtcggcttcaatgaaacctttttaattatagaacccttcaaatgaaagatgtccagccacgctattaacaagttttttatgtgcttatgtcgcaagtcatttacatgtcaacgtaagtaacgtaaagttactacgccaacgtaagttgccaagctaagtgcctacgctaagtgccaacgtaggttggcttgtaaaattttgaggctaatagtaattgaatgttgcactttgtctatagaactccagcaattcaaagtaatatagaagtacgatagtattcaaagtaaaatacgatggaatttggtgatatcgtgttaataattcatccgatttaattttcgcaacgtactctctaggatacttgcaagagtttcctctcctgcaaagttcgtctccgcagactagggtctctttccgtgggagcggtcacgtcacatgttagtaaaatgttatttttcaaaattttaaaaaaattggtggatgcaatgacatttttcaacatgtctattaaatcccgcgaggcaatgttcgtgatgttaactgaagcgtctcagagggaaatcgatcgagactacagaatcggattattgttgtgcgcaacgcgccgtgacacctaaaaatcgtagactaacttcacggcctctgtcaaggtcttccttttctgcgtgcatgccgttacgcacaaatcgtcgttcctctgacataagggcgtatctccatttctacatgagccttggaaagcatgttgttgtatggggatgagggctcacgttgaaatcgagatacgcccttacgtcagaggagcggcgaaatatgccactttatccctcagagggacattatgcggagtgtaaaatgaagggcttttcgtggtcgtctggggtctctagattgagggttggggggcggctccccaggaaagtcattaacatttgtaagttacgcagtccaacatcacgctatttaccccaaaaaactccataaaaatcaccgtattaaaaagaaagaaaaagattctcctcgggaaaaagtcgggtgactgccccatttgtcttgacgacacgccgtcacttcacaaaaatgaaatccgtggaaaatccgtaatgaattcgggggaattttccaggaaatcgggcagagtgtgggtcacgggcgatgcaacacatttccgttcccgcacgcacgtcgcggacgacttgaacggacgtgaaaagactgcacgggagacgtcgcgtcgcgtcccggccgtgtcgtcgcgacgccggccgctccgcgccgccgacgtgtgccgatgtctcatccggcacgcatgaataattagcgctggtgtttttttcactttttcagccattagctgtcgaatttatgggctgtaacgaggggttcccgcggcggcaaatgagcattgcacctggagcagcccaccacccagcatgttcccaggagcggcgcccgaccccggcctcgccgccaaagtgaccggcaccaccgccgtcctcctcgcggccctcgccctcctccgcctccccgccgccgaggcccagctctacaacaaccccaacttccgctgcccctacaagcccatctgcgcaaggtaagcctcccccataatcactcatcttacaatctcccgaaactttgagctttttcatacacactggaaaaaaacacattggatctagagtccagactctttaaaacatcgacaagaaaaaatactcttgattcaatcggatttaagcttaaatcaagaaccaagcctcttaatttgagcggatttccttttgatttaagcttaaatccgattgaatctagagtattttttcttgtcattgttttcaagagtctgggctctagatccaatgtgttttttttttttccagtgcaccaaaaagaaagttacgggctatgtagacataccgtccgtttcgggctctgaggccgaaagttccgggtgctggacccatagcttcgactgctccggttgctacaccggaacgcagacggaatgtctatatcgacggtgtaagtccgcaaacacgtatctgggtttccgacgccgcatacttcctgacatacttcattttttaaatgaaaaaccactcaacagcaattttttaaaactgccgtgatttcgtttatatgtgcgacgaaaattcagcgaaatcttcaaggaatgatcctgatgtgttctcctttaaaaggatgaaataggagcggagattttcaaagaccacaaacgagatacgcggttgcggatttacgccgtcgatataacccgtaagtactgcttccacggtcggagttttttttttttttttttttttttttttttttatcttcagggtacgaattttcactcaggtgacaggtgtttagttaaattgtaagaatggatctgctgcatatacgaagagacaaagcggtcactatacagggaaatttttccatcgtaaaaaataccagtctatcgttaccctcgcgaaagaaataagctgcatttcaatgttgccaaattgctcttcgtaaattgaatttttactacgaaaatcttgggcatttctaaaggaaatttgccttattttgcttcttaactcatgcaaaaatcagagaaattttaggcaaggattgcacgcgtacattcttctgagaaattgaattgtttgacttattattgcaaccgtggaatggaattacattccttcatccgagaaacgacgaaaaatgttgaaatatgctcgatttggctcgagtagacttttggctctcctgcgcatggagtgtgcagggcgtacacaaaacagactatattttctattgtgggttgcattttgaaaatttcgatgcgttgtattttgcgtaaaatattaatgcagaaacatatataaggtgcttaatttcatactcatggtcagtctgatggcccgttggagcacttcgacaaatactgcgtcacttcgtcacacgagacgttaatagcacacgagagctctattcgactgagcaagattttaacaacacaaacaaaacaaatctcacgaaaatcatgttaaaaaatgcatacgagccactactcatcacgtagagtgtgtggtccgtattgcaacttttgaagtaattgcgttcgcgggcagcttttcttgacagtctttgcctaggaagagccgtaagcgaacaacctattccgaataaacaaacaaccttaaaaattatccttgtgtatgattttaatggttttcatgggtctgttttctccttctccgttacgttttcaagaacgagtactttaaatcaattgcgccaatgttagcagcaacaaatgcattatgtacccttttcccgaacgggccttcgcgtacctacaattgtagccccttgatacaactattcgtacttgatgaatgcgcatgttacatacccagatattggaaggcgctctggttttcatcagcggcggcgcggcgattccgccacattctccggtgctacctgggatgcgttcaatttgaaaaagtgctactcataccacgcagagtatgcgttcagaggatccagcactttttaaacatttcttaagtacctagcgtagttgtagattgttgtgcgaattcatgtaagaaattgcgcatattttgaatttttttgaactttgtacagctggaaatgttcttttgttaaaaagggttgtacggccataattaattttattcttcctaactcaacctaactcggcagattaataaatctgccgagaacttagactttcaaactctcatcgagaattttgaacaattagtgcgttttctttatttccgcggattcatagctccaaaccgaatcttgccctaatcaagattcagctttgataaaacctatatttttcggcagtttttacatgaaaaagttattcagtcaattagagctgtcgtgactcttaacatatagcgttgctttgaagttttcaattcaaaattaattcttacaaaagccgcttgaagctgggaaaaggggttgagacctagggaaaaattagcttgatagtcaaaagctcgccaacgactaacgcttgcgctacttctatgagacagttttacgagtaactatcggaatagatgaaaacataacacaaaacacgaccgattagaggaagtaaatttattttcccttcattgtgctctactcactcccgttaaaaaaccaaaactaagaaaagaaaaaaaaaaaataaaaattcattccaatcattcagcggttgcgggaactggtattctgccgtgttgaggaaaaacgccgtatgaacctccaggtgttgccaaattttctttgataaggcacacatttcctagtaaacttatgaatattttgttcttctaattttcagataatttcgttcgcaatttcacccaaagatcctgaaaatttcaaagataaatattcataactttccttaaaaatgaacattttatcgaaggaaatttagcaactctcgaattttcatacggcgtttctccttagcacggctgtgaattccacaatgattaaaaaaatgcaccgaacacagaagaaacaattatttattttaatttttcgggtgctcgcattcccaatatgcggtcgcctgaaacgaatttattagatccaaataattaattaaattcatttgaataaaaacagtccgcgccaacgggaattaatatgcacccctggagattaggagagagaaactcactacccaacaataactatcacgggtttttctccatttaccggcttgcatccaaacaagccctgatttaaacctggaggaaacgttttaacaactgaggcgttctgtggtgaaaccaaaacctcttatagaaattaaattctcgcaaggggagagctatcattgaaaagacacaatacttgattggtctgaaaaccctgtgcaacgggctgcgttaaaggtcctcaagcatgaaaaacattaaactatctgtgcgagctaagcaaggtgcaattttctaatttgaaaaggttcaagcaaggattgccgagtataaccccgataaattaaattggcgcagctaactccttgttgcaaaacgcttcgcataatgtgtagcggcaataagctcgattcgttcaccttgctaagccctctattcataactataactaacacaccctttcatgagtagagctattcaacttcaccctttccttttcttttttgctttgctcaactctgtatttcctcattaactggtagtaccaagtgccatatgagccagtaagatatttctagtcggtatttaagcccaggcctgtgaaagacacgttccctcaattttttctcattatgaaagagtaccctggtgttaagggctgttaaaagtacactaagaggaaaaactcctataataaaacgactggtagacgaaaaagtcctaaaatatataacctatagttctttaacaattagagagattcagaagcatgttataaaaaatactctaaacagaatggtagttcttttaagacttttttttaacgcaaattgtgccaaacgtaagttgtgctgaacaaatgtcgaaagtatttccttcgacatgatgttcatcagttttttttaagtttttgttttaaaatattatttttaacagttggtgttacattacagaattctctaatttcatgaaaataaaatgagcaaaatgatcaaattgagcaaggtaaaacgtttttatcgtgttttattaaaaaattttgtttttcaaaaatgaaacattttggagctgtgaactcaaattttgtgtcaaacaacatagcatgacgaatgacgcaatagtacatgggatacatggagttggaaatgaagagggtgaatgtgtatgccacacaatttagagtttatgccaaatatagtcattcaaatctcaagctcataattccaccagcttgaaagagagaatatttcccccgtctttatgcctaattttctcagttgtgaaaaactacaacgaaattacagggaatggatttgtaagagttcaaccttttccagtatcaaccataaagtttttcagttcttcactcacgttttgctctttttccaacattcctttattattagctctggcacttaaaggagctcttaaatattagcgcctcgtaaaaatttgaaatgtacctattttttccttaattttaccgcatgctaaattataacgcatgcacaacttaacgactttccgacatcacgcgagaacgataagggcacgaaaacggagcctaatgcgcagatcagccgtatgagaggttcaaaattacttaaaactgaacgaagccgagaaaaatttcacacgcggtattgtatagaagatcatcttgctatctagtgtgaaattgccctcgtaattaggagacaagccattttgacaggtataaaatcaggtggcaataaacgtttgagtagatctcagatgcagtttactcgaaaaagaatatacctaagtcttccgtcacatgtcgaaaatcctgaaaatgtccacagtcaaataaagaaaaaatgtttattcgtatttacagcccttttttaaatttaggaggaaaaaacttgtctttaggttcaagacaaatccctgtcgagcattgacggtaaaactcccaaaccacatatctcgtttgcggggttttagaatctccgctcctattttgttttttttttttaaaggagaggaaatcaagataattcttagaagttttaatagaatttccctcgtacaaagaagaaatataatgaccatttttaagaattgccgttgagtagcattccagataaataaaaaagtatgacgggaagtctgcaaaccgagatacgtggttcggattggaagtttcaccatcgatgtttatcgacattgacatggatatgtcgtcgctcctctgacataagggcgtatctccatttctacatgagccttgaaaagcatggagttatatggggaagagggttcatgttgaaatcgagatacgcccttacgtcgacgatatgtggagcaagcgggatcccgataacctcaaaaaattagagtattctgtggcggacacatactgccgcggtaaggaaatacgccgtatgaacattcgagagatgccaaatttcctccgacaaagtttttatttttgagaaaagttatcaatatttttcctagtaatttttacactctttagatcaaattacgagcggaattgcctaaaaaatcgaaagaaaaatgttcccgaaaattcgtgatttatcaaaggaaatttggcagcgcctaaaggctcatactgcgtttttccctcgcacggcagtatgcgtcagagggctttctcagataaaagggaaaccttttggacgtatttatgtcaaaaggacctatgtgcatacggattgcgtgggatatagttccttttggtatgaatacgtccttttatccgttccgactggtgttaaaagaactcatctttaaatcccgcacgcaatgccgaatatgcatgatgcaccttaaaaagataaccttgaatttagccagtgatgaaaccgtaaaattgcagaggaatgggtaaaaattataacattcaaactgtttcaacaatgcagatagctgctgcgtttaatgagtgtcatcgttgtgacagtgaacttgacctctattctattcctttcttatgcaaaacacgcgcaaccaaaacaaacacctctcaatcggaagtaaattatgagcgtcctgttcaaacgtcattaaatcctctgtttatgacgcagatgggccacgtgttcggcaatgttaccgacaaaaaaattaaaaactatccgttcctggttgcatcaataaaaaagtttaagaagagagagacgtcctacagtggatcaaatcaattagagaggtcggacatgaaacttttgacaaaaactccaaatttggatgtttatttcgtcatattttaaactataatgggagcaggtagcagaaaatttcacgaggaaaccaatgaaaccacttttagaacctcaaagttttgtgtaaacggagttaaaagcgtttaaagtttcagaattttgtccgacctatcccattgactcgatccactgtgcgtccgttagctcatcttcttgctaactttctcgaagaaagtattcacggcgcactggaccgagtcaataggaggagccggacacaatttgaaagcttatatttttgaaaataaaaacaaaaaagtttaagtgtggttccattggttttttcgtacaatctcccttcagaaacacccatcgaaactgaatttgtgacgaaatgaacgtcggctgagcacttaatatggagcccggtaaaactccttttccaaaatttctgtcttctcctttcctttaaaatcgtgtgcaatttattaaaaaaaattgcaaccgaagataaaacctgaaatgtccgatgatgttttaaaattcccggaagagcatgcaggaattaaaataatgcacacaatgcacaggtattattaaataaaaagtatttcaacaacaaaatttaggtcgcttgtttttttttcttatttgtaactcatattcgtcttaagatatatctcattctcacaaaattaaggagcagctaatggaataattgaaaataaaatcgatgtcagcgctggtgcatttttcgacttcacctatcgaatgaaacgctatctaaacccattcactccatgataaaagaggggtttttgagagatgaagagggaacttcgggtgcgcagaatacctataggtaagatataagctgcaagaaaatcttgttaactgcgacttgattaaacgactgaaaggaaagctaaacgctagacttaaaccgcccggctcaatgggatctactgataaaagaccttctttatctgcttcgccgaaagggcttccgacccttaagtcgcaaacttgaagccaaaatgagagtctacggcgtttcctgaagtccaacctcgatccaacctcgatactcaaaattgaccgaagtgtattgtgaagggatttatcctctcggattgtttcctgagcactcaaaaaaaaaataaaataaaaaaataaataaataaataaaacgttgattgtgcgagccacattattgtgctcctaaggttaaatcttatgaataggcaagagcgcgaaaaaagccgttgccactaaaagcgattttctaaagtttgctcgaactaaagatgtaaacatacccaaataaggagcccttacttatactgccgcgctaagaaaaaatgtcgcacgaaccctcagatattgcgaaatttcccttgattaactacgaatttttaagggaacctgtaaattctattcatccaatttttcagagaattttattcgcaatcaaatataaattatctgataatttcgagaccaaatatttaatataactctccttaaacaattaaaattgtgttggaggcaatttggcaactctcgaatgttcatacggcgttcttcctcggcacagcagaattagatatttgtgcggtattacaatcctttgttgttcgagatgtttcagttttttaatataatgaatcaaaatgaaataatttttcattgctttttccgatatggagggaaatctctttgagggaaaattcttccacgatgagagtctctttcagtttatatcaaacttctatcgccaataaaattaatgtcactattgcttgccacacttaatttttgatgggaacttggtggataaaaaaatttcatcctcttgaccgatcagataaagggagcgcgatgctttttgcggatgagagatttcaaattctcggaagatgcgaattgtttgagcctcagctgagagacgagccgcggttactgagacaggcagtgggattgtaacgtagaagcgagtgcagtaaatttattagtttctagaattccagtcacataccccattatgaaaaaaccacataacagccatgacaaccgagcgtagttgtgggtttttcgcccgactcaacacacaagggaagaaaatttcattattccgcctcggcgttctcccagtccgcgtcaggtttgtggcaaagctcaaaaatctcgtcgcagttttccaacttctcggagaagtaattggtctgcattttgcaatggaactactacttttggctctccaaaaaaagaacctatatctgcgtagggaaacaaatggcacataagttttttctaacattagtcagagatgataaattgcttactgcgaaataaagttcaatgatgctccacatttcatcgaaatcaaattttctggtataatcacacgcgtagctaggtactttttgtggaagagacaggaagacaccttatcaagggacgtccggaggacccccctcctcagctccaaaagaaggtcatgggggacaatcctggctccacagggaggttgtggagagagctaggggagggagccttcccagaaaaatgtcgaaaaattgagtcgttaaaagcgcaattttgtgttgttttgtcgaaaatctgattttaatacattgaaagagaaggacacattcgccaagcacttattcagcgaaatccctcacatttttttgagggaatgcgtggtagactaatataggatcaaccccgcccgaagttgaagagattaagatagctccgcgatcaaaattttggattaatcaatcggctgattgtgagattaactataaaacccaagtctctcgatttatatggatttttctcacagttttacgcaaatacaatggtattgtgtacattgtcaaaagtatttttcatacacttttgaaccaaccagaagccataatttaaaaattataggattaagcaagccgaggaaacagggaagcttatacaagcttatacgatacacaaagtgtatggaaaaaccaaattattactaaggcttcttttttttcttatatagaagttaataataaataataactttaaacacctttgtatacaaaatgttataattagtgaagacaaatttttgttgtgcactctgctatgaaagggtagagatccactcacacatcatagatttacttaaaggtagtgaatgaatcatattgtaacatttgaccaacaagtcccaaaaatcaccggcattaataaaatctatacttgaaacaaaatatcgtcgaggagaatgttgcaaccgtgcaacacggtagacaaattttaggaacttatcaacagaaatggatcctttttgttacagagggtacagctaactttctcccttaaacttcggagtaacctcggcacgaaaaaatgaatgctacaagagggaaaaatattcaaataatgcacttaaattccttgaacccggagcaaggaggaaattcgaaacaatattaaaagctaaggatgagatgtaatactgttaaagaggcgttaatctggtttaaagtataatcctagtattgatgatctggaaggttattaaagaggatatttcaggtctcagatgcttagtgctcgggctcctttgatgagagctcagtgttgaggtgcacttaaacttcgcagggaaaaggttgctgtaagagagtcattatcggtttcaaggaagtcataattacatgaaaagttttaagtgcttcgtagctcgaatccgcgaaatgggatccagaccggggacaactctcccgcctctgctttctgtgagctccgttaagaggtgtgccgacggatattgaaaagctcatgaaatcacatgaagggaaaactcgagaatccaatttaaattgttgatcattcgaattagtcaagttgagaacttacatcaaagtcaaccgttaaaatgaatcagctacactccgaggattccggtttgttaatttttacattcaaatggggccagccctcggtgaaatattgaagaagatgaaacgaattcctgaactcatccagtcctaattatagccgacgcataaccatttacttgtgagtttcaacagagttagcgaacttgcggattgaagagcttcggaaaaatgttctgaacttacgattcctgggggctgaatggacacaccctccacgtagctgggatttcctgcattcactgacaaaagggcgtatctcaatttcctagtgagtcctatcttacgtataaatacatgctttctggggttcattcgtaaatagagatacgcccttgagtcagtggagcgacgatttaatcatggcggctcttagagccatagcgttacctcactgaacggccctttggaaataagtttttttacgagagaagtaggggaatgacaacactcaaagaattttccaaatatgtcctctaactttatcgtttaaaacatatacatactttcatcgcatttctacaaacctcccttaactcgatgaggaaagcataaaatttctcaacactgttaccagcaaacactatcaaaaaagagatttaaaaaaatcttgggttttgcttggattaacgagtattttgcgtctcgccagtggtaattcttgcaatttttccctgattaagtccctttttaaacttagcatgaataattgattcactgtgagatcaatttttaacaaagaaataaagcctaaaaaatattgatctgttattcatgatgcggaaacaagacggaaattttcaaaatacatttttgaagtatgtaccataagaggtgggcatttatttgaaaatttcgagttgcctttcaccttgacccacaactctcatgaagaggtgaatggtgtcgtggctcctatatgcaaatgcaagggggggggggcttagggggtgtgcgcctccccctcctggtcgcccgaaaaaaaggaggaaataaagagaaggaagaaaggaggaacggaggaaagacgcttccaattagactgcattttgcaatttggaactataaattctggcccggtttaaaaacaacgtatgcgccattagtttccctatgcacatacgtgtttttttcaaataagacagaatttatagctccaaattgcaaaatgcggtccaattggtgattaataggaacgaaatgactccaactccatcttagatgcttcaaaacttaataaaattctctgcctccctttccacccccctctcccctccgttcgaggtgtctggatccgcctatgcaattccctgcccatacccgaaaaattccccccatttgtaatgcaaaaacattctaaacaagaacttttcagttcaaatagaaaaaggtaacaaaataagtataatctcctctaaatgtcgcgatgttaatacgatggatactccatccagtttccagtttatcttaacaatctccccttgatattgattaataaattccaaatcctgcggttaaccgtacaagcaatcaatgaaaacaaatcgcagatacgattgcagattgtaaacatttgtggcctaggtaacaggcgtcaaaggcttcaaaagcctttgtgctcccgtccgatgggtttacaacactaatacaacctcgtgaacccggccaggcaagagggaggattcggttgtgttacatgcctcaatcgtgtccacctaagtttcatcggtgggatttcgcgctaaacctgattctgcgtgactgttctgctctgtgttcaacgctgaacattaaaagcgctttactgtacacgaactcccgcgtgtaatcaaatctctttgaactgtacttgtgaacgttgtaaatgattaagagcgtccaattttttctacgtagaccctgtttcgtcgtttttcggacgaaagaacgtaaccccactccaagaagttgcaaagttcactcgaaaagttcaatttttttacgagaatgctcctgtgcaatctctgttaaaaatttttctgatcttcgcaaaagatctagggcaaaagcagtaaaattttagttagaaaatcccaagattcttctgctgaaaatcgaacttcaaacggaggaaaatcggtgagaaaaagttttcacactacactgaaaaaaaactccggccatggatgccatactcacgggctatacagagacataccgtccgtgctccaggctcggaggccgaaagttccgggcgtagcgcccagagcaatcgaagctacggttgcatcacccggaatttttagcctctaagcccggaacgcacgtatgcctgcattgcccataactattttttttcagtgaatcctgggttttgtacttagttggttttgattctcgttccatatgctcaacattaggtataagcacaaacgagagactcatcatacattctatcgattacacagtcggagcgaaatgtgacagaggatgtctgctgcctacaataggacagatttacagcagtacttactttcatgaagaactcaagtttctcgccccataagacggtgtatgcggttttcggcgctgtgcgacgcacatcggcatctctctcctttcatacccgtcccttatttgacttttcatggcgtcttttgaacgcgcaaaggtgtgcagacatgcgatttcacacatgtgtgctaaagtcagaaattctaatcaaaaacttcgcttttcaatcatatattcggatgtgggaagatgagaggaacaagttcgaagacgaacaaagaaacaggagatgtttcatcgtcaacgtgccaattcacctgaaaaggcacggagggaacggttggaggctttcctttgggaatatacgatgcgagatcgagcatgtatggaggcacaacttgaagtcaaatcggtgcaaaattaatgtgacggtggtaattgagcattcacctttccatgctctacttcaacggatgaagaacttttactgcgatggattatatttgaagaatggagaatttacatccgccggatgtttttctgcgattaattgtttccgatgacaattcccgcgagaaaataatggtggtctcgaaaaagtgtatcaggaccactttcggtcgaaaaaagctctggggagtttttgagctatcagtgagtaagtaaatcttaccagttagctaccattatagtagcatatttggactgcaatataagcagaaaggaacaaagccacatcagctattgccagatttaattgggcattagaattttttacatggaaacggttgaacggatttttgtgcaaatttcagtgaattctctgcatagtacgaagcaaattccgtaaaattttccaaggaatccgcacaaacgttctcttgtaaaaaagtaaagtgcccagtttctgggaatggctgttgtggcttggttcttttctgctaaacgcagtacatttcatgtaacgtgctgataaagaatataccagatgtacatttatacatgatcatttgttgtaaattgttttatacgttacaggatttaaacaaatctaaggacctcattgacattatttgcttctgaacagatttaattttacattccttatctctaagttttgaacatgaaagcatgataataataattcaacgattcagtccaatactaaattcaaggaatccaggaaaaataaagacagtctttcaaatcgtgaagtaaaaaatcggaggattactgaatccaggcacccggtagagccccgacagcttcaaagcccccttcaggaaacaaacattgtttgagcaggtggtgccgaccagcatattgcgtccagactcaattttctgccaaattactaaatcgttcgcacgatggtggcacacgactatacatcctttaaacgaccgcgctaccacacaatttctgctcgaaacaattttgcgcgctatttactctcagcacctgcaaaatctgggcgaaatagagatcttactaggtgctcagctttgtcacttaaccatgacagattctctggccgtttttcaaagaacaatataatgacactatttcattcaaagatgacgcttgattctctggagaaggatttgatcaggcggtatttcacgttttggcaaagttttggaaagtttggaaagttttctggtgagattatttctagtgagattaaatgtactgacttttttgtgcgctttttccttttttttattttttttaactgcctaatatgttaattcaatgaaaataaagcagactaaaagaaaagctaatttttatgagcgtattttataaagcgtatttttatgacacgtcgatttttcaacttctattccccgttttcacattatccaagttcatgcgaggttttaaatacgcgtttttcgtttttgcatgtaataaaacattgaataagcctgttcctcaaaaaacgtgggcagaaattttacatgagcatattattatgaaaacatagatattaaataattataaaaaaatgttactaattctgttataaaactatgttacaacattcagcactccaacaagagcgaaacaaattagcgaactctgatttaattgctgtacaccgattatttcttcggcaaattttgaacttataacaaaaaattagcaatgaattgcgattattaattgaataaccattgttaatattctaaggaagaaactgatatgcgtgtggttttctgcttgaacaaagatctccttcaaatcgttgaaacgcaataagctatacttgtgagattacgtccataggagctaagcttgcaggaaaaatgatgggacgtagatacgattcggcgattcatcacttaaaatcgacatattttttgttattacatcgaatcaacaataagcctaccaaatgtcaagtattgaaaattcagcgctaattgtacttgttatgaactgtattttcgtctggggcacgcatcatcttcaccttttaggtacaataaaatcaatggttcccaattttctacacttcttatcattattcttcctctcacagatgctcaaatattctagtataattgtacgtgatttttatcttattgaaacattttatttttcgtttgtccgcaggtaaggatcacacccatttttgtgacaatattcctgttattttcacatacattccgtaaggtaatcacgatataatttctatttcttacatactatttgacacctgcgatttagagaattgggaaaatttaccagtgtcttatgtctaatgaattagttgttatttgtaaaaactaacgttaaatatatttataattgtcatttctcacattaacacgaaagtttcatttttaaaagagctagtcacacacaggtattgctgatggagcattttttaattgcttttaaagtaaacggtctattcgtttcattcaaaaatcttcaatacactttcgtactggaagctacacgactgataaaattattttaatttccctgtagcctaaattgcatcacgtgaaaatgaaggcaatctcagtctcgcgctcgaatttttgctacctcaaaaggattttatacttccttgagaactgtaaaacgagatcagggtgaaagagggaattgtaaaagatctccagcacttttttatccgatgactgaaaaataataagattcttggatcttaaaagacgatttttatttctgcgggccgctgctgtattttgatgtacaacgtgccaccctctatccacatccattagaacttttcgcgcgcctaattcgattgccttttctcactcaatgctgcctgatctccctgtgaattcggctacataattcatgccgtcaagtatttcctaatcgtaaagaatactgcaatactgtttattgttatgaattatcaacgtattttataattactgaaatgacccagaaaacatctgagcgagaatttgtgaaaaatcttaaataataaagtcactagtttatgaattgagtaaagcttccaaaggataaagctcagcacttctttatgaatgcctccctgaactttcgtttcaggacgaagaagaatggtagtggctaccagactgttaggctgcatttgattggtaagggtatctaatagccagtgccagatttcagagagtgtgtcttgcaggacctctggatctactcgacgcatggtagacccagaagatacataatagtatggagtctacacactgcctttttttatgcgccttcagggtgtgaacggcctacgccatacataccctgcagtttactatagtaagaccaatatttatgattgagcgaaaaccaaactttctttgctttcaaaacatgcaaattcacttgaacattagaacacatcttcaactcgttccattgtgataacagttgccataaatactccatcgtttttacagtgaaaattcttcaaaattaaggttactttaaaccttcgttatatgaacaaaatgtccctataattagttaactccattcttctttgttatacctgtatggtttgccatctacagagaaattcacagaagaaatagtgcgattattattgttcaaaagagggaaaacacttgaaatttgacaactgttttcgttcgtccggagaaactgacgaaatcggtactcaccgcaagaggtataccgatatttatttcggcataaaagtaagatgtcgcgaaagttccttccgaacttttctctaatgcctcgagcgtaactttccttttttcaccctaaattaatttcgccccgaagcagagcgtaagcccgtcagcagcgttctcgcttttttggagcacggagcaggtgcaaaccgtacgaaatgagctacgactcatctttttatgcaaaactcccgtgtaaagggaatgctgtcaagttccttcggttcggagaagttttaaattcagcgttaccatttccactttaaaaaatcaaaaaattcaagggttctaatttattgctagggcgcttgacacctacgtttatcgtatcaatgagtccggaatggtttgaatgtgagtgttgcggtttgcgctaaaacgtccgaaaataaaatccctgtcatccttaccatttccgtttgaacaaagcactggaggatagaaagttgaaaagttgaaagaagaaaaattatattccaaaatttattgaaagagcatcctttacatttttattcatgagccctctaggaacctccagggatttagagacctagagatttgttaaaatgtgttaggttgctataacgtcaaattgaataaaaaatacaaacatataaagccatttttatagcgcgctctctggcgttctgcgacacctagccgccaaagtcccctatcctcccaaagccattcagggagttagtacataccctcatttcacaaatgaatcacaaatcatgatctaaagacacccaccatcagaaaaacaactaatctgctctaaaatcactcattctgtttggaaaacttttgaaaacttacaagggaatattctctccgattttttcctctaatttttcttcaatttctgcctcctctcaatcttttttcctttcaatttggccatacctccttcccattttgcttcctttgatctttttctcttccgtatttttgaaatcatccgatcaccttcacttcatctgtccagagaaagtaaaagtggataatttccacttctaaccaccactgtttcctcctcctttgctactcgtgacgagttcttctttctatgacgaacgtccacgagtgggcaagcgacgcacagtgggtagagtcaatgagagaggtcggacctgattttaaaactttaaaagcggatatcttcattgatatgaaatgttgatgttttaaaagtagtttcattggttttctcgtaaaatttcctacaagaggcacccccaaaaaattaaaatgttgaagaaataaacgtaaaattttacaattgttgtaaaaaagttcatgtccgacttattccaaagactcgttcccctgggcggcggcctttaactcgcctcgttcgatgacatggcgggtcaaaatcatgcacgttttgctcttgacttaaacttttaaattcatcgtcagtgcgttcgggtcgggcctcaatggcacacgatctgtttataatgccccgcccgacaaggctgcgctttccgccgccaactgattttcgtccgctcagtattcggcgcactccgcgcatatgtccgcgaattatcacaccggcatccatcgagtcgtgcacgttcgctctcgtcccagaaatggaacggttgcgattttttctgggtacgctttcagggttatactcggtaaagtccgcataccatagagtacaatggagtcacaatgtactggagcgccgatgaagtcaatccaggaaccggccattccgagccccttgtccgccggagagtgtgaaccaaacggcatttcttaacacggcagctaataggagaatcgcgggctgcaagtttttcttgggggatttagtaatttaaatcgacaattgttatctcgaattttggcaaatatgttgaccatagtcatgagaaattcaaaagtgtatattaaagttccggttcttatgaaataaattttattcctgaatttgttgagcgattcccagagctggtacctcgcgtatacagtatcgagaggttccagcacacacactcaactaggtggggctgcctgcatctgcggtactatcctaactttaaaggagagttttgagataattctactagctttacggggaggtccgggggaaattttttgaaaaaataagttgccttaggggcaattttgagctgttctcgccgataaattgatccaattccaatttgtaatatggaaaatgtgtcatgcacttaccaagcaaaatccctcacgtctcttgggagtggccaagtaggtttgtggaggaccagccccctccggcccccctatttccgcccaagaacgtgagattgtctccttggaagtatgtattattggcctcacacagtcacgcatgcatacctaaatagtaataatattgtattatcttttctataactgacttttgggtttattattgcctcctacgccgcatgttctagccatagagtaaatagagtcgtaatgtaaatgggagagctggcgccacttttaagcattttccaggtctcgaatcccgagactcgtgtcactttttccatacataatcgattgttttcgatacacgcggacccagcaatccgatataaacaaacagaataggaattattacgttttcaacatcgccgttttggatcgaaaatggattgaaagagtgaccgaagctctacgcacacccggcttcaactcgtcgaccagaacttgacgtcagttctaccatttacattacactttatgtactctatggttatagcctagtaaatttctttgatccgttgctctctctctctctctctctctggtccgcgtttctactctaccttattttttaagatctgaatttgccttatttgtctgaatggttagcatggagttcgttttcacaggtacaatacaagtgttttctcggaaatctaacaatcctacaagacctctgccgtgctacggaataacgccgtatggacactcgagagttgtcaaatcaccctcattaaaatatttatttttgcggaaagttatgaatatttttccttgaaattttcaggaactataggtgaaattgtgaacaacattatttgaaaaattagaatcaaaatatacgtaagtttaccaggaaatttgtgttttatcaattaaaatttggcaatgcctggaggttcatacggcgtttttccttagctcggcagacctgaagaaaaaccagcttcgcatgatcgcctcctacgtctgctgtctttctccgctttcttcttcaagcgtcttcaagacgcgtcgtcatcccggtttccctcctccctgctcccaccctcaccccctctcccgaaatcgaggctggaagacctcctggaggaatgccgatccacggagacgccatcgacgccatccgtcggcgcggagaaaaaaaaaaaaaacgagtggagacggcgtcgagcccgtgtctccggcgcaaggttagcgcgcgacggcacttcgacccttcgatatatcgaagttcgagttcccgcgtggggacttacgggggggccggcgtttcgatccgcttacctgtcggtgattgttgaccttgccggggacaaggcgctcggccgcgtgtttttcgcaaaccagttgaaccgaatcttttgagagcgctgcggtgggtacgcgccggcgccttccagtcagttcgtgacttttcccgcgcaagtgacccggatttcgaaagttccgcgctcggatccgatttgttttcgatcgcttcgtatgattgtccgactcggatcattttccgcctgatttccggttcagtgcggtgtattgtctttttttccccctgttggtttttctgccgtaagctttatgggcaactaaattttcacccctttcttgacttagaattaaaagaaaatttttgtttgtttgcatgtccttgaggttaccgagcactattcccttaggactgacattctgtgttcttttctctgtgttgtgtgggctttcggaggattaatagccaatgggtgctctctaaccgatgtatatttagagatgagataattttgatgttgtgtatttttttactcccgattgtatccctttttgtttactttcgatgcgcgtcatcctttttggaattgaatttgttctcagccgtgcagttatagttcattattttcttaatcctaattacagcaatacaacagattttggtttattattaattacattttaaaagaaataaatcgtgggtttttctttgagaaatcttactctgctctaccaaaatattcttagttgaaagttacgttcctaagcgagggaggggaggggagagaatgagagaaaaaatatttgagtcaataaattggaacgcagcggccacgtgggttttgctttttaacaagggatgcgctattaactctcacccctaccttttttccctgccttttcgtctcggtacaatgtttttgttctttgagatttgataattaagtttaaaaagtactatttttcttcttaaaatacagatgagataatttcagtgtatcatgagactactaaacacagaatctgaccaggaaaagtcactttatgattaaattgagctccaaaaacaagaaaatttccttcgcctcagaatgttctgcataaatattaggctgaaatttttatcggattaggttcagcaatgaaaacaactgtcttgaccagggtcagagaagtgcataataagttgcaccgctctaaaataccctctcttttctctttcttgagtacttaaaactcattttgggtcttaaaatgtgggagtttgcaggttttttaaatagatattgttcgtgaatagaaataccatacgaaaatgtcaatgaccgttttaaagaaaacctgtttttcaaccattacttaacatgtattgacactcgtatacacaaataggtatacaggccatatatgatattcaccagaaaacaagagccacccacactaagctgtcataccggttcatatttcacgtgtccgtcagactagtacattcgtgccctgtagagaaaattctccttcactttcttaaaaaaaactttttgtccgacattttttcccaaatgaaacatatgtacgcaaatgcatttcttttctagaagaaaaaaaaagtttttaacgtattcaaccaatttcagaaatgaatggacatattccccaagatacgtcagattataatgttataaaaacattttgtatgaaagaagtttagaccaatggaattatttgccctttaagcacagttttgtgttgttcacaaccagaaaagtaggtaggacctggaatatactataagccttgtaaaagctatacattccgtttcttcttgacgttgtcggaatttttctgaggcgaatgaaatgtaagggaaggtgtttcaaaaatcaataactaacgcaatttatttaaaaaatagcaacgattaataaacacagtgagctctgcatcatcgggatgcaggctgagtgagtgatccgtcctctgcgacaaaaacgcgtttcaggactcataaagagtgcggtcaattttaatttcgcgccaaaatggtgaacagtgtggaagacgtttttgacgacgcagagaacgagattggtgattcctcgcccgttaggaataaaatcgacaccaacatcgatgagccgaaatcgaaaccccagatcgaatgcaaagagtgcaaaaggtatgattctttctgtgcttatgtgacgataattttattgcatcgagatcatgtccagtctgaaatgggccgttgatagggtctagatgaaacaatcgtccccttccgggcaaaaaatcacggtgtcgtttgcgccttgaggccatgttgccgagcatctcaatctgatttaatttttgacgaagaaactaatgttcagagttgaataagtttccaagaatttctaaaatttaaattggttcatggaattttcattcgctaaagtattacaagaagtgttatgcaaaacatcgataaaattaagcaacatacccctcaagtccaactggtatttacgatattttgtcttcggggtacttacaattttttaaaaaaaaatttttgtcaaaatcaacgcattggataaaaagacgagacctcttaaaaaaatgggcggatgctttttttgaaaaatgtcaatggccaataccaacgctttcgttatattgattgaaatgtttgaaaaacaacattttgaaaatgctggcaaaattcactgcataagaatgtcctttgtccgttgaagtgagtgtacatttggacgacggacaaagatttctgccgtgcccatcagtcctgttgccattttggaagagaacaatctgagggccaagaacacagagaatttgagtttttcttgtcaccatgaccaaatgcaattttttcgtaaagacttttgcagtaagcgattctcgaaaagttcgcaggaatggattatgtgcgccacaattatagtagttcatgtttgcgtctcatttcttgaaaaatatattgctcttttttttaagaatatgaatgtctcattgaaattcactgaaccggttacatacgcttatgaaagctaatagtactcttgagatacacgctctgagctttaaagtcaagaaccgattaaagtgaccgccgttaggtacactaaatactcacacgctgagtagtttaatctcactcgctactcaagagtcattgatgagattgagactcataacgtcaagaacatgtttttgcaaaatcttggaaacgcatggaacaaaacacgtcagactaatgattccttactttcagtttaaacttcaatcgggaggagatactttaagtgaagcaaagcagaaatgtgacgtgatacaacagagatggtacagcgataacgtaacttataatttgacaagtagtaatcttccctttgtacttcatggcaatgtttcatgagccacggaacgcagagcgagaagacaatcaaagcgaactgggaccgaaaaagtaaccaggaacatcggttgatcagtaattaaatcgccccagttgcttgaatgaggtgaaccagtccaaaattatcctacatgtcagccgacccttggattcatgccggggcccatttctgcccccccccccccccccccccntgaaagcaatcaagagggtctgggctctctttggctcgaaaatgtccatacagaaggttatttttgaaaattatgaatgatttttatgcgtaaaccgtgagatattcttggtggcagatcccgcctaccttttgggaacaatcctgacatctccctggacataaagaaactaattgggaggctgttagtgttaggtgatcattgcaagtaaattatgacattggcgttctcccagctattgcattcgaaggaataataaacgaaaaccgaaatttatgttcttgtctcgtggctgacaagattttttataggcgacgttctcgacaaaaggtcaaaatgtttcggttattgacgcggccgcgcagcaatttcactaacgattgtctccaacttttcgtaatcgactttttcgtacttgatccgtggcaacagcttcgctgattcctatggctgatatggtttatcctaagactttttttttgccgaatattcacacgggcaggtgcggaatggatgcgaaagtccgtggcaactttgcatcattctcgcaaatactcgattatcaaaacaggacacaaggtactgacatcattaaaataaataacataattatttagtttgcatcagatacctcatgaaattcacaggaagcagaaaaggtattactgtatcttgatcgatgagaaaaaagaattagaccacgagatcattataacggtgtgaaattgttgcacctttcaacaaaggggccgaaagtcaatttcgagggacaccgcgtttcattgccaaaactcatcgttaggtcttcatcgacgctatggagtcattttccctcgagtaaaagtgttttctcaagtcatacacggaagatacggatagtgtgtttgctggccaatgagacggtcggataaatcaatggtgtcttggcaatttctaatcctacgagtaacttaaaaaatcgctcatgatgatcaattcttgaagagtttgcttgatgcttaaattggtaaaatcaataagcatggatgaatgaactattttgcagttaacgctactattttcagctcactagaaacagcgtttatgccattggtttccctatgcagatgggcgctttcatgaatgagccaaaaatagtagttcctattacaaaatgtagtccaatcgtcgatagcgtacataatatgggggacccagagactgcatcggtgcagggtcgtttaacaccatctcttcacgctgtatatagcatggaacttaacattatgcaatcggtacagttacaatcgatgcatgtttagagtcatcgatggtcttattttcagatccaacttgcgacgtcagaaaacggcctcaaagcttttccatgtttaaaccacctctgttcacccgtgcgtgtgaaaaatcagaatccgtccttatgttaggcgtatccacgtaacgataacgaggacggtgagatgccttaattcaacgctttggttagtttgagcctgtcagctgtttttctttcccacgcgacagttgagctttccgaaagtttcaatatggtatatatagaatgcttcaatttgtggcgatttaatccggacccgtggttgtttttcgaaaatgcccaccccttcaaatcatgcgctgaaagaacctcacgcctgattattctccccctcaggtgcgtttccctgctttaacttttcagaatagctttaatgctatgccgaagtttataaacttgtgtcgcgggcgacttgcgggcatgctagtggtgtgcaaacttgtttctcgtaaatcaattacagcgttgttcatgtattttctcaatctggaaaccactgttgccaatttactaacagcgaagtgagtcgaaaaaacgagttggtagacaagggatgctgatgagagccatccaatggattgcattttgcgaaaaggaaccaagagcattccaatgttgccaggattgtgcaaattacattcgtttaaaacaaagtgctggaatcatgcgggaaattaaatttacaaaggtaattttcgtcttgaatttatagtttattgggagtaaagataaaacttgttcagggtgattagtttatatttgcaaggtaaaaaaagttgtacaatctcagtgacattggaatgctcttggttcatttttgcaaaatgcaacccaaatatagtataacgttgagtaaaccactcgtacttacaattggtctttttgaaaagcgcttatctatctaatgatttcatttagtcgtattgagtcgtatacaaggatagagttatacatgagaagaccagctgcacatcgaataatgaaaattaaaatagccttttgggtggcattgaatagatagaacgttttactttccatattcttgcagatgcgacctatgttgaccgtaaaagcgggaattacatgaggcaaatgggtcatatctacgagaggataagaaacacccaagtgaccatagagatgatggagtcttcggtgggttttcgagtgcttgactccaactcccgagcctcttgtgcagtcgttgcagtaagaggagtcgtctcctcagtgagagaagaaaatcctattattcgtattctaagaattgagcatgatcgttattttcatagtatacaaggaaaggtgtttctaaattctcaaatatctaatgaaaaaccgtacttctataacgtgcatttggacgtatttctctcaaatggaactatgtgcatcatgacataagccctgttatgcgcatatgcttatgagtctcatggctcatgtcttgatgcacatacttccgtttggtagaaatacgtccatttgaagaacgccgagacctcaccatcatcatcatctcaaatttcgcgccgatttttcgcggaatgtttcacgaatcggaagccttatttatccgatgtacattcacagatctcccccccctccccccccctccaagttattatcgtcatctcaaattttacgtgaacttttgcggaagttttcgcggaaaataggtgcggatcagtgaggtatttttccaacgctcaacgtgcattcaataaactccaagtttggtcatcttatcgtagatttcgtggaaatttttggcgggaaattcgcgaatcggcagcatggaggttgcgtttcgattacggatcgagcgttcggcgagacgggagaaatatgcatgttgcttgtctgcaaaatgaaggcgcaccccgaccccggcgcggggcggcgggcggcgtctggaagtgttgtctctctcggggttaaaaagaatgcttccggtgttggcgtcttcctcgaccttgcttccgccgcctctcacttctccaccgagacaggattaagttttattgtttgttcatttttatctctcttcgccgtacgctgcaccgagcttagccccctgacactctgacaccccgcgaaaaaacgggggacccagatcaagattgttgcccgcaatatgcactatgttctagttcgcggaagctctctcagtcgtgaaacatggggttggtttctgagaccgacctcgcaagattaatcggctgcaaacgtgtgatcttcaggtgggtcgttagtctctgtgagaagttgcctttgcagagattattttaaaaatttccattttattcacttaccgcgcaccgtagattttcatccctacacggaaaaaacgagtttaggatggggccctaactagaggtagggcagtgagaggtagctcacgtccctacagattataggcacgagatctccatgagctagttgcgaacgctgccaccgactgggttttgaggttttagttactgcgcatgcgcgcgcatgcgcaggagtagcgaacaccgtcatttctcgctgaacgccagttgaggactgatgcccgtatgatcaggtgtcattgatatgccgagagggggaattgcactcaagaggcgtaaattcgcttcctcattcatcggggcctcgtggcctggtggtaccgcgctggtctaccatctctgcgatgcgggttcgaatccatgcgagggcacggattttttacgcttcgcgtcgatatgcaggtagggctggaccctaccttcagcttgggcctgaccctccgaggtttaggtgaagcaatttcacctacccgggtttggggccgggccctgcgccgcagtacccgatcctaaacccgttttttccgtgtattttattctgttttcgtgaaaaaaaagcacgtcaatatcatgatgcattctgaacggtttcgagaaacttcggtaaattaatattctgttctgatacttacttctgttctgatacttacttatttaaccaggggtgtagaaaattttaaattgaatctatttttctgccggaacaagtcgatatacggctcatctgggagttaaccactttcgaaaaatcagaaaattgtttctaaaggtcatattaggagtagtattcttggaagtaattcaagtctccgagatattgcgagcattttgtgacgtacagattctaattctttgaccctctttcttatttgaaacccatgtttgtctgttgcctaagtaccttgaaagatcgaaatttagacccgtgcgtggtatgaggacaggaaaccgtattatcttaacaatatttttgaaattttacctctcgcttgataagcattgtttttagaaaactaaatttggagtggtatccctactatatagaaattattgtacctttcaattttcgttcttgaagctcggtttatttcactaatggtggcaaagcgttagagtttgcctattttgcgaaagagccccgatagcggcgagtgcaacgaaaattatacaagtgctgctcattaaaagtcacatcgactcaacaaacattcctcggtactttattgaatggaactcaggaaagtcggggtaattgattattccgtatctttgtcaattatcacgagcccaaaagaacaagtcagttttcaattaaaatttccattatggctcatatttccgcggatgaacaaagtaaaggcgatccaaattggtgctccggctcaacgacagctttggcttgcttcgtcgggctggcaggtcgcgaatgaatataaattgaacgtttcttcggttgtcacatattgttttcatttccagttcgttgcgaatcgtgtgacgcacaagactttaacagtttgacaacaaaaccgaccgcatcaaacaaaagctcttcgtgcataatttttggaggccaagttctcaaaatcgataaaatgttgatggctgtgttgttagctctactttaaaatgtattcacactaactttcaaacgttcttgcgagccatttcctggatttaaattaaaaactgtcaataaaacgagcatattggttgtcacggagcaaacacaaacttactttacaaacacttactttattacaatcggtattttattcttttttatttgattattccatgagaaagtgtgacttatctcaaaataaggaattttggctattaagtaattcatatttgacttctatagtcgtagtaaattcaagcttgtgaggtttttccatagaaactatttaacatttagaggtatgttatgcatgttgaaggtaaataataaaatagtgctgaccgacgtcgaaaggttagggggcgatcatgattttgggcccttcctgccgaatagaaacccctcgaagggagggggatccaagggatttccacagaaaaagagggggtgcgagggcccttttagctatattcgtagctgttccggcttgatacctcactcatattatttcataacttgttaccaccagttcgccttcaatatcttgataggcaatctgagcggcttaggagcagtaatagttgctttccgcattttcgccaccctcactcggtttgttcatagctgtagcgctagtggtttcatacttcaaccccattgtttctcactccctaaggccagttcgtgttcaatatctcggtaggcaatgtgaggggattgagtgcattaatacttaatatatgcgcttgcagcagttttgccatgtttgcatgcatcgatggtatctggtgcgtatatatctggtatcgagcatagcattgccgactaatataatgttcagcatttgcaaaaaatggagggaaagctgctttttgaagattccttcgaagagatgggaacgaaggaaagcttttagctctgaaagctgtaatcaacaggtggcttacaaaaagatgtgggtgacacgatttgaatctatgacgacacaagctgagttgaagccgtgacgccacatggaccacatttttcagtaataaactattatttgaagcttttttgtggaaacatcatacgcaccattagtttcctctatgcaaataggacttttatggattacccagaaatggtactatcatgtttcataaattttagatttaaatttggacacggtttgttgcctcgaaagagaaattcctcaagttatcacggatattctgtttacaacgaggtgtatggcgggccgttaggtccaaaattcccgaatatattaatttttgtgagaatatattttttttccgaatatatatttttttcccgatatatatgtatttttttgagaatatatatttttttccttgagaatatataattggtttgagaatttattttttctcagaatatataatttctaaaaaaaaaaaaaaaaaatattctcaaaaaaatacatatatatcggaaataaaatatattctcaaaactgaactcaacggtggcatcgatgagccacagtgttgccaaaccataccgaagaggaatgcggatcgtgtcaaaactatttttccggatcatacgaagggccttccccggcttttgattggctcgcaattttcctcaattttctttagtttgaaagaaaatttctcgtggaaacttctctgaagtgcttctcaaagcgactacaaagctattgatatattacacctaccatgtttctgtttttttactttcaatttgaatcaagtctcaaaaaaaagctgtacctaagctaacctcaaccatgggtgttcattttcattgcaaagagaaaacattgcaaatagccaccagcagttctcgatctgaaatttgacaaattttcaatttaaaatcatcttttgtgacctaaaatggttttttgtctttcaatcagtgtcgtcttaataccttttcagttcagtttctaaagtttatggcgtttcttcattgttcctttcgctcctaatggttgaagctgaagccaagtagctcgtcggtttgatctgctttttttcctcgaagaggatttaattgtgcctctccttcaagtctcagctttagcagtgtcactttttcatcataaacaattacttcggtaataatcaaaagtttacatttcaattctgtatctacaagtgtctgcatcaggaatcgttctccgagagcagcatctcatgactgcagcatacagatggaaattaagcttgtttcatggttttatttaaacaacttgtgctctaaatttatcgttgaagtgacaaatggtgtgtattactgtacccgaaagcctagcgtagaaactttgagcacctgtctcagtgtgagcggtcctttgttgcggtcaaagctgctcattgatgacagtttctcaaaggaaaagtcttcgatggatcaagaaaaatcgtctccctgaaatagtagttaacaccctttcttcatgacaatctgaaaatttagtcctcgccctaagtttgggaccatttctcagttttatccttggtgttgcggtgtcatcagaagtgcacaatttctgtaggaacagttcatggtatgatttggaatattttaattaccacttatcttggtatgtgacgctacagacttcctgtcatactttattttctaaatgggaaaccacttgacggaaggttttaaaaactgccgtgatttttcttctctttacgaagaaaatcctgcaggaacttcaaggaatgatgtcgatttgtactcttttattaaaagaatataggagctgagatttttaaacactgtaagaagtttcaaccatctgctctgcaaagataatttgaattcaaatcatcctatgaatagaataccatgcattcggaaggggtgagcacttgaggtttcatttgcctggggaggcgcctttcaaattcactgccaaagggactctagcaatatctggcaaatggaaggtactgtcctagtccaaaaaatgtaaagaaagcctaaccaccccctgggctcgatgtagttgctggatttttccccctatttctggattattatttgaggatgcctactggatcttaactttcacagaagacggagttaatgctgaaacaggaaaatttaagttggaaagtctgagaagtggatccgtacctcaaaagtctgaagcttcacctttattccagcccaaagagatggttatagaaacattcaaattttcaaaagatgttgacctagggcagcagagaaggaacaagcaaggtcaaaggttcaacccgatacagggagaaatggcattgattattgctctgtttagaaaaaaaaaaagtttaaaaacttgctttggatgtttttcacccctctcagggaaaaagaacagatataaattcaggtatcaaagaaaaacagtgacaataatgggcggcgcttcgttcgaggaaattttgagtgacatttagtgctcacagcattcataaaagcgctcataatgacatttttgaaggtttacccaaacgtgaaagaccattaaaatcttcttgacatgacttggaaataatttcaatgaaatttcaatgcacatttcaaagatttaggaaacctgtgatgatgattgattttaaatgattatgagctttgagttagaccaagaacaacacaagacacacctgagcagcctgattgttgaaattttttgtttgtcgggacggcatagatgacataggttaaaaaaccgagcgagattagtcggctatgtctcatccctgctttgtcgtgcctttgtcaggtggaatggacaacatactgtcggaaacttaagaggtgccgttagcttgtcaagagttcaacttgacataggcacgacaaagcagcgataagacatagccaaccaatcacgctccgccttttaaccgatgtcatctatgtcgtcccgacaaacaaaaaatttcaacaatcaggctgaaatcacatgattcattttgttccctataatatccgtagaggaatggtaaaggaaatcattcggagtccgattaacactcactaggaaagatttattcacgtcaaggaaatacatattaaatcttaatttatacctacatacataagccatggaagaattattagagaatgacatagaatgcgtcatcagtataagtcattagataatttttcttgatccatcgaagacttttcctttgagaaactgtcatcaatgagcagctttgaccgcaacaaaggaccgctcacactgagacaggtgctcaaagtttctacgctaggctttcgggtacagtaatacacaccatttgtcacttcaacgataaatttagagcacaagttgtttaaataaaaccatgaaacaagcttaatttccatctgtatgctgcagtcatgagatgctgctctcggagaacgattcctgatgcagacacttgtagatacagaattgaaatgtaaacttttgattattaccgaagtaattgtttatgatgaaaaagtgacactgctaaagctgagacttgaaggagaggcacaattaaatcctcttcgaggaaaaaaagcagatcaaaccgacgagctacttggcttcagcttcaaccattaggagcgaaaggaacaatgaagaaacgccataaactttagaaactgaactgaaaaggtattaagacgacactgattgaaagacaaaaaaccattttaggtcacaaaagatgattttaaattgaaaatttgtcaaatttcagatcgagaactgctggtggctatttgcaatgttttctctttgcaatgaaaatgaacacccatggttgaggttagcttaggtacagcttttttttgagacttgattcaaattgaaagtaaaaaaacagaaacatggtaggtgtaatatatcaatagctttgtagtcgctttgagaagcacttcagagaagtttccacgagaaattttctttcaaactaaagaaaattgaggaaaattgcgagccaatcaaaagccggggaaggcccttcgtatgatccggaaaaatagttttgacacgatccgcattcctcttcggtatggtttggcaacactgtggctcatcgatgccaccgttgagttcagttttgagaatatattttatttccgatatatatgtatttttttgagaatatttttttttttttttttttttcgagaaattatatattctgagaaaaaataaattctcaaaccaattatatattctcaaggaaaaaaatatatattctcaaaaaaatacatatatatcgggaaaaaaatatatattcggaaaaaaaatatattctcacaaaaattaatatattcgggaattttggacctaacggcccgccatacgaggttatttgtttgctcaatggagagagaatactcccagtgaaagaaatagagttgctgtacaacttttatcagaggcttatgataagttctttcttgcgctatgtacatcgatcaaaacactttatgagtgctttggcaaaccttttctctcagtcagttttgcggaggaaagcgtgtatttgagctattaatgtaaaatatcccatgaaaatcatatgatttgatatgaaaatttcacttttacttcatcaagtaaagacaagatggctaccatcataatcagatgaagctcttcaagaggaaacacatatggcaagagacagccatgacatcgcaaaggtaaattgtcacccataccaacagtaaattttgcgcccctccatcacctgggccaataagaggagaaggatgaagaagaagaagaaagatgcgacgggaaaaaggagaagaagaacacgaggaagaagaggaaagagaacaggaagatataaaaaaagaagaaacaccaaggaaatccgcaaaaattggatagatgaatgctcgtaaaacaggtcaagaccctctctcctcagatcgtaatgtattttatgaaaggtacgcggtttcataaaatgtactttcaatttattctgcctcgtctttcaagaatttgagcaaatttcagagatttgttcctctcttcttctgcagggatcttgaccctagtccgcaaagacaagagaccctccactagtatcttgcccatgatagaagctttttctttcgggacctcagcattctactgtcgacgtacctacatggttgatgttcaacaacgtgttggtagttttgttttgcggacaagccgaaaatggccgaagtttgggaaacttgctcggctcatgacgtcacccgaagctcatcatccaccatgtaggtaggtcaacagccgaaattagggtggtgagtgttgctcccatataattgaccataagaaattgttgaatccccgaaattaaaagcttccacctgtcgccaagaggttagtggagggtctcttgcagagacaagagacccctccactggcctctctggcttcttggtgacaggtggaagcttttactttcggggattcaacgattccttatggacaatcataagagagcaacagtcatcactcttatttcggctgttgacctacctacatggtggatgaagagcttcgggtaacgtcatgagccaaacaagtttcccaaacttcggcttgtttgcaaaacgaaactgcaaactcgttgttaaacatcaaccatgtaggtaagtcaacagtagaatgctgaagtcccgaaagtaaaagcttccaccattgccgggataccagtggagggtctcttgtctctgcttgtctaagaaaaccttggttccttcaactaatatgaaaaaaagaacctgtgggatcaaaatccaaaatctcggggaatcgtttccatttgaattccattcatatgagcggagtcgtgtctcctcgtgcgcttatggacgctcgtaactcgcgcgtattacctcgcgtatccacgcgaaaccatgaaaaaaccacccgttcgtcgtcgtcccttcggcgaggataatacgaccccggccccggtcgcaaacgacgggaccgatagcgtttacctcgggcgagaaagcaatgcaacttgtttcagcctcgtaaaattgcgggtgcttaaatcccgggcggaggatattctcctctcggcgagaagagtcgtaaacggcgcgagggcatgaatcaaataaaacgacaagttttcgcgcatcaaaagagacgattcaattcgggctgcagagttatctatcgtaaacgccgcaacatatgcatgttgcgaagaattttaccgcggcgctgcccgattggcgcctttcaatgtttcaaacattcgaactttcgaattcggaggggtctaagtcaactacatttgaggggcttggaggacttatccgcataagtgcagtctttgaaaaagttgagatattaatgattccaagtaaaactagtcttgacgcatattctgtgaaaaaatcgctctaaaatcccaatttttaagcatcaaaaagttaatttaaacttttttcccgccataaggatccatgtaatttcgaaacttcgaacacgtatttctcgaaatagcaaacactggacttatgcgcattgtcttccaagcccctcatttcgttgttgcgaagttttacttgaaaattgattcattttgcaagagcaatgataaattttcaaaaaaaattctttgtaattttttttttatttatttatttttttattattattacaaaggcactgtacgcacacttcgtaagagtgcgctgcgaaaaaaagtaagtttgagtgaccgcgacaatatgagtatagaaatcaccaacagactatatgatgccaagtaccgtaactctaattccatttaccaaaagtatggtaaattcatccagatgtctagtattttcatcctacagaatcactgtgccaagaatcaaggcaactcgtgatagaatttcctataaactgcttgtggaatttgccgtacttttttttcagtgtaggtgctcccttcgaacaatttctagctacgctcttgtaaaaacaatgagatcggagggaggtgttgcctctttccattttggaaaaaaaaccctatacgattttcattatgatacggtcttcgacgcgggcgcacacgaagtgctcatttacgattgggccgcgccacagtggatcgagccaatcagtgaggtcttgaatgacattttttactaaaactgcaaattttgatgtttagtccgtcatattttaaatttcaagtagtactccaagatggaaatttaacgaggaaaccaatgaaaccattttcaaaacctcaaagttctgtaagaacgaagttatgagcttctaaagtttccaaattttgtccaacctcttacaccgacgcgatccactgtgcgctcagcggcaggactcgaatccctatcattgaaataattgtcaattattactctcccaacaaatcttagcagcacctgagaattttgcttcttatacgtttttcttaaatgctctgttttggcgtgactgagagatggcatacgtgacggtgtggaattaagagtataaaaactattgtaaacgaacctttcgccgggtcgcgttggttcgttgtcggtcattgcgaaccgatttgatacgagcgcgtcgccttgctttatgaaattcaaatgaggaagcgaaaagagaaattttgacggtgattagttatgcacagtgctacgttcggcaaaagatgcagaaacatgtctcggaatgcctcgctgcggcgacttcatctccttaacatcgtgcgatacataaaattctctcgatttgcatttgttgctcggtgcgtttattgtcatcttgtgggaagtctaggaatgaagcaggggcatatttttagttgacattgttaagaggagatccgattttagtttgtcattgatgctatctctcgactccttaaattttcgattcttcctactgtgctaaggaagaacgtcgtatgagctttcgaaagttgccagtctttcttcggtaacatttcatatttgagaaaagggaatactttttcttgaaatttctaggaactataggtgaaattgcgaacaaaattctttgcaaattggacggaaaataatcataagtttagcaggaatttcgtattttatcgaatgaaatttggcaacgcctgaagatttatacgatgtttttccttggcgaggcagagtatgtgaccaaccgcgagaaaaaggatcttattgttaatctagggacgaaattttcgatggagagattttcgttgagtcgaaaaatctgatttgagattttgaccgggaaaagtctccgttttaatcgagcggaaatattcggttacagcaaatgcagcaggggcaatacgtccagaaaaacgatacgactattcgaactcgcgggagctcttgttgcctacttcgtctaatgaaggcgaactgctcagaaatgactgacaccattaaattcagaggtttcccccatgcacataagtgtttttacggaagagccaaaaattatagtttctgatttcgaattgttgttcaaatggattacattttgcagtaaggaaccgctatctctggctctctcataaaagcacatatctgcatagagataccaatggcatgtatgttgtttctagaatgggccagaaatagtggttccttattgcaaaatgtaatccaattggtcattgtggaacgaacatgggaactaggccaagcagcgctcaagtgaagtgcctagatcctacaaaagtagatttactaaattcttcaaattcacatgtatctcttccattttcaccctttatatcttgagaaaaaactattaaacgaagccttgcatgaacttacttcgcaagaaacattcgcctgataactattttagggaccaaattcctactgagtattgtgaggatgttgcaactgtgcaaacctgtcgcggttgcaaaagcgcctacgtttcattggatcaaatcccgaagcttcgcgaccctttgatcctttcagtaggtgacggaattttccgctagatttcagatggggttagcggtaatgcaattgattggcagaaatagagggctttcaccgaaaaagactcgagggaatcgttaccgtgaataaaacgcgaagcgcaaacatttttgcgtacaggatggctcagtgtcacttgcgaaattgagtctgtcttggagataacatttcctttgtatgttgattattgaccgaccatataacagtcgatgaaaaaggcctgttggaaatgtttcataagaggcgataaaatatgggagcatttaattaacatgatacatgagtacacggctgaaaaataatgtcggtagttactagatacctgcttaaacacgaacgtagttatcttactgcactttacgttacccttcttcgacattctctggaattgaaaaaggagatgctccttaacggggcaatttaattttttacgagacaacgtttgtgtggactcctttgaaaattttaaggaatttgtttcgtactttggagaaaatctattgaaatttgcacgaaaatccgcccgaccgttttcatgtaaaacattaaaatgcccaattaaatgtggcaatagctggtgtggcttggttcctttctgtttaacacggtccacatattatactggcgaattcaacgtttatttacacatttctttcgtaacttaaaaaaaaatgggaacagatagtgagctagaatagtaaattcaggcacgccaaggatgatagggggaaaaacattttcaaggttcttttaggttcatgtctaacgatatgcgtctaatcagtgcatattcagaaaccctcgcaatccaatgcgttcaccgttcacacatccatcacttagctggacaacggctgtaatttattcattgcattcttaccgttgcaccacttcattaacgtagcccatcttcaaagctgcagccgcgtaatcgcaggggcacgaagaaatactgggagctaactcgagagtgaaaaaacgagaacagaaccccataacaaggcaaagtcctccggcattttttgtcgtgcttcaacgaggagacactcactctgacagtgatatcttccagattcctcatccgataggatttcaattcgaagtcgtcctgttgtaaatctagttacgtccaacgttgccgcttttctttcttaaaaatgtatttcttttcgaacggagtagtgagtgagaaaatgctgagctctccaaaaactggcattgcacttaataagaggtatcgtcttgtgacaggcaattaagaagattgactgttgttcgtctgagtgtcctcattttactggtattatctgaccgtgcaaggcaacaggtaacctcgctgacgtcaggaaatcctaatgtttctgaaaggatctcttcgtgagggctcttctttcatcggtcccacaaatgtttgttttcgggggctgaagctgggcactatgtacgaccggcattggcggatccagcaaattggcaacattgtcttttctccatttaaatctatggaaatgtattgattcttggtggggctagttccgtcaaaaatcgattatttaacataggtttacatggagaaatccggtgttgccaaattgctggatgacgaccgggcggagattcctccggattagaagtcaaaagatcaagcgattaactccaaattggactgcattttacaatttggagctattaattccggctcatctgaaaaaacacttaaacgcatagggaaactaatggcacatacgttgttttaaaaccgggctagaatttatagttccaaattgcaaaatgtagtccaattagcactgattacattttagaacaaacttgaaagggaactgtgatttatcaatttaaacggagaatattccaagggatagtaatgatagcagtttcaaatgatttacatttgatcttttagaatatttttataattataagaaagcaacaactgaatttaaagctcaaaactttgtttgaacgtttaatttcattttgagatccataagcacttttcaaacttacatagaacacatttacaaatggtatcagtcgattccgttgtattgctttatgtataaatattcaagataaacctcaaacctaacgagacaaatttttaaaaatattcaggcacgcatgcgaattatcatgatacaaaataattcgcctatcgagccagccttatgacgtcggagacttatagacagggatttagagctgaggtttgagacagatcaattttttgggaaggaggataaaactggctgtaaccccaaagaatcataaaattgaaagaattgcgtctctcttcgcctgaaaccattgaatttcttccgaaatcacgcatttcacctcatttcaacctccgtcaaaccgctggctagacaaagttcgtcgcttatgttgccgagatgcgctattaagaagggaaacgtatggatttcgtagagaaaaaggaagaaagctgccgttttgacagcctcagagtttccagtcagccaaaggccactaatgaggggtgcagaaagactattgtatacaaatatttaatttaaaatagccagaggttcatacggcgttctcccttagcacggcagagttgtgcactgttcgaaaatggtatacaccgaggtaggttcgacaccaagaaaatacgactttagatcaacttgagcccgcaccgtggtatacgcgcaatgcatgaagtatcctgcagacttgtaaggcgctatatcatgcgtggcgcgcaccgtgctgaacgcgcaatgcatgaagtatcccgcggtcttgtaaggcgctactatacgtgtcgtgcgtgccagtcgccagccccgcgccggccgcactgtgtttgacgcgattattcaaacttgcgacatcagcgcagcggtgttcaacttatgattttaaagtttttgtacagcttgttagaactattgtcatttccagcagtccagcagttcgtcgcttatgttgacgagatgcgctattaagaagggaaacgtatggatttcgtagagaaaaaggaagaaagctgccattttgatagcttcagagttcccaatcagccaaaggccaccaaagaagagtggagaaagactattgtatacaaatatttaattaaaaatagccagaggtggaggtctgcatttggcacgaggatctattgaaaagagaaatttcgtgacgaagttttaaatcgagaatactcttatcagcacaaaccattatgagtttgcctttggagttttctgaaggattaaactttgtgagttgcacagtgtttttcaaatcaccctatgagcatgctaaaggatgcaaacacccttttttccctgcatcctcattaaaaaaattttcagtattgatatatttttggaggggaaattcgaggtaacagcttatcactgtccgttgtatgaatgtttcaggtctttttcctaactttaaacgtagccgagggctaattcctacttctaacaattacgcctttcacacgaacttcgatacagagagacccttccaagataaaatagacttccgttggaggttctctgatcattgtattgactttgaacattgttctactctcacagaggatctagtcaatcagagaagtcggacatgaaatttccaactaaaactgcagattttgatttttagtttgttacaatttaaattttaaggggtgaaatcagatgaaaattttacgaggaaatcaatggaaaccatataaaacctcaaagttttatatagacggagttatgagcttttaaagtttccaaattttgtccgacctcccccatttactcgacccgttgtgcggcgttcagtgataggagatcaaaagtcagtgactttgacttgaagcggacgaatataagttggaactttcttgagcctcaaagtaaaagaaacatgcacgaattcaaatgtttgcacactaaatcttctttgcgggcttttaagtctggacagtaaaaaccatgttacgtgagtcaattatgttgacagtgtaacttggttccgtttcattgtatactgtcagttcgtaatttcgtttaataaaaaaaaaaaaaacgtattcttacgaaacaaaagaaaagaagtctctctgaatagaataaacacagcaattggctcattggtcactgaattggtgcgtttcttatttagaaagatgcactaaatgatcgaagttactgcccttaaataatgacgtcaccgttaacgtgatattgtgtatgttattgatgacgtcttctttattcctataatttggggaaaagaatccggccgagagaccgcacacgtctgtgaatgtaatttctgtgtgcatcatacacgtctgtttttcatcgaaatatatacaacccaaccttcaatcgagataactcgtcgaagtcttcagcaatcattttcgggtcgaaaaaagtccgaagaggtacagttgattgcgtcactgacgcaactttcacgaccttttgtgagaacttcaaacggacgctgattaccaatgagttaagtctacacgcgttcccacatttccactacacgttgcgctgctaatccttcgcccggcgtccacattttgacagtcaaaggtcagaagcgggtctctagaactttaaattgcaactttgagcgcgtattcatgttggccgacaaagcgtcaaatcgatcgcagttcaaaaggtgtcttgttacgaccgaacgtgaaaaggaatcaattacccagttggggctcttcaaaagctctcggggcgctcgcgaccctttgactttagtcatactcgtatcaggtccagaaataagcaagttcgaattgaagtttctaaacttaattctgcctcctgacggtttttttttgcccagagaggtatggacggctccagcttccagtgatgctggtgctcattcttctctatcttttcctctttcgtcagttggtcaagaacagaggttgtgtttactgattaaatcatgagcaggtaagatccgtgttaaaaaactatctcatgactgtgacattttattaatacgcaaactacatttttctttaaaataatctgagactctctgagtgagtttattcctcgaaattcatcatcatccaatcaagttggaaaagaagtatctgaagtcgcgacccttcgactttagtcatactcgcatcaggtccagaaatacgcaagttcaaattgaagtttctatacttaattctgcctcctgacggttgttttgctcagagaggtattgacggctcctatagaaatttaactatcgtggattgtccggaacgaatgatgagtaaagtttaaaaatttcaacgtactgaattttcgctgaatggatctgaaattggaccatggatacttaaagtttaagagtcttgaaatactattaaatgttatagatttttggattctaatgaaattcaaattattaaacactggctgaggtcacattgaaatactcatcatgtcctgcagcattgattccggaaaacttctaaggaagtttttgtcgtgctcctgtttcttgtagacatttaaatgctctcattttgacatttttgacgctgaaatgtgaaaatattttttaaaaaatatgaagatttcaaaaatcaaataattctacgaaattgcgatttaggcttttcaatttcacttttcctaattttgaattcgactgaaagatcttggtccttttgacaatcgtcgactctaaatgtcacattcacagaagatgaaaaatttgttgttacagtttcaaaatttaggaaacagggtcaatgtcgacagctgttttaatttctcgttcagtaatgacaaacaactcagttcacaattttataaacacactttttcttaaaactcggtcaaagcatcatccagcgtaaagtatactcggcgagacaatcacctgataaaatttataaacacaaacccggagaagagaagctgctgttattttaccgcttcattttggctcttccgctttctatgacgtcaggagaagttcgattaaaacctctcgttactcttggaaatcactcaagggaaaaatcctcttcgttaccgttcgttaaaatgcaactccagtctacacgagtgcgaagttttctgattggatttttgcaaaagataatatttcttaggtgctattcaaccgcttaaagtagcttttttgggggacaccgtacttttatctctgaataactctctggtgcctcagatataaaaaaatattaaatttcgaaaaatcccctggcgaaatttttccgaacttatattttttacttttaccctcgaaatttttttggtttcaaaaagtggacacttgactcatcgcactgtgtcgtggatccacggatatttgtgttattgtgttcgtggataagtggcataacgaagaagatccacgcaacaatactattaagtcactattttagcgcttctgtgcgctttgcgacacccaaccgccactgatagcgatcctgccagagctcctctggcagatcgcatctcttcatttcctgccttattccctcaatccacgatttggtagggcgtcctctacgttttctgccagggggagacccaatccagaacctttcttaggcagcctatcatctggcattcgttttgttttttatgtacctactttgctcaaatccttgactaacgataggaatttccctcaatccacgatttcgcagggcgtcctctacgttttctgccagggagggacccaatctagaaccttcttaggcagcctatcatctggcatccgttttggtttttatgtacctactttgctcaaacccttgactaactataggaatttcctgctttgttacagttacgtctactgtcagggtcccctcctgtacgactaccagttctcgggcctcttcaatgactcgaagacgttcgtggacaagcggctcctgttcccggaggaggagatcgtgcgcaagtacacggccctgaagaagtcccgcggcggcgagctctcgcgggcggaactggagagcttcctcgcggagaacttcgccgacgggaacgagctgatcccgttcgagccgccggacttcacttcggagccctcggtgctcggctacatccaggacggacagtaccgacgcttcgcggccaagctcaacgaggtctggaagaccctcgcccgcgtcgtcgaccgcgatgtcctcgagaacccgcgcatgcactccctcctctacgtccccaacaccgtcatcatacctggaggtaatcccacgcccttcagtttagtaatggagatgttgcatgtgtaaggaatttgcgatttgactgttgattctaatgtaaaagttcgcgagaaacacgatggtgccactggttttctctgaaatcaactcccaagctcaaaaaaagctctcaagttgaggccaaaatggaagggatatcccaccctaccctgagagtccacctctacatcaagacaaactctccatgcacagatagggagcaaatatattgacagggctgccaccttatttggggactctaaaattgaaatcaaggcaaccctgctaatgtatttgctccctatctttgcatggagagtttgtcttcatgtagagatggactctcagggtagggtgggatatcccctcccttttggcctcaacttgagagctttttttgagtttgggagttgacttcagaagaaaccagtagcaccatcgtgtttcttgcaaacttttacattagaatcaacagtcaaatagcaaattcctcacacatgcaacatctccattttaattgaggagttacctacgttaaacagttcaaaatgtccatgctcatcgttatattcggcaaagtctcgcgagtggatttggtcgaagttgttgacttactgcttacattcattaccacagaacgaaattccctctgggcgacgcatagtggatcgagtcagttagagaggtcggacatgaaagttttgactaaaactgcaaatttcgatgtttatttcgtcatatttttaatatcaaagagtgatcctatacgaaaatttcacgaggaaaccaatggaaccacttttagaacctcgaggttgtctataaatggagtcataagcgtttaaagtttccaaatttgtccgacctctcacattgactcgtcccattgtgcgtcgttcgattcagcaattttaattgaggagctacacagtgaaaaatgtccgtgtatttagttactttgcgaattatctggtaattgctaaagcctaggcgagacctaaatgtcaaaatcaaggacaaaagctttgataatttcatttcaccataagtgtttttcatgaattcttcttgcgtgattcaaaatgtgcgattgttgttgcaaatcgaggggtgaaattcggtgccggagattaaattagcaccataaacccatacaaaactctgcaaaaatagtagattccgcttcacatccatatctctcaggggttttgggcgctatatagacggcggcactgaattttttttattaaatctgcaaatttagatgttcaccatgcttcactgaaaaaaaaaaaactccggccgtgggagccgcatttacgggttatatagacataccgtccgttccgggctcaaaggccgaaaattccggctgctggaggcgtagcttccattgctccgggttcagaggccgaagctacggctccagcagccggaattttcgatttttgagcccggaacggacggtatgtctatatagccggtaattgcggctcccacgactggagtttttttttcagtgttcatattttgaaattcaaggggtgctttaaaatgtaaattttttgaggaaaccaatgggaccactttcaagacctcgaagtttcgtaataattgagttatgagcttttaaagtttccaaattttgtcagacctacctcaatgactctttccattgtgcggcacaggatttcactccaaaatttttaacagtgaatgaacgttaaagaaattctctctctgtaacaggtcgtttcaccgaagtatattactgggacacctactggatcgtgaaaggcttgctgctgtgtgacatgttcgatacagcgaaaggtgtgatagacaatatcatatatctagtcaaaaagtacggctacatgctgaacgggagcaggaactactacgagaaccggtcccaaccaccgctgctcatcccgatggtggccgcctactatcagctcaaacaggacgaggcctggcttctcgaaaatctcccggtgcgtgcaaagtgtcaataatccggataagtttaaaaataattggacgtatttctatcaaacggaactaagtgccatagggggaggaagttagaggggggcttggattggcggcggaatcgggcgtccggctctttccgtcctatactcgcaatgcttttccatggcgcttagttccgtttgacagaacgcgctatccgggattctaaattcctcaaaaggaactcaaattggcgcttagttccgtttgacagaaatacgtccaattgaaatacttccgtatcattaatagtttacttcatcgcacaataggcaacgctggaattaagttgattcgacggttgccattgtttgtgtcagagcgacataagataggtgcatcgcatcaattcgttccataaattcagctactcgtcattttttccgaattttgagattagtttcctgatgccatgaaactaaaaaattcacgtaccgaatttcacaaagaaattcaacgtaataaaggcagggtttttttattttagggggaaaatatcgcatgcgggtgcaggttcgatgtcagtagcgaatgggatatttttcctctaaaaaaacccctgcctttattacgttgaatttcttcgtcaaaggtacatgaatcctttagtctcatggcagcagaaaaccgatctcaaaattcggaaaaacatggcatgtagctgaaattatggaaagaattgatgcgatttgtcgcacgtcgctcggacacaaaaaatggcaaccgtcggatcaccttaagttacggtgtaagagaaacaccgccctcaggtagtgtcgaatgcgacgaacactgtacagatttcattttaacgcctggatgcaactattcgggctctatggatgtccatgttgcatacgcacggaaatgaaggcgttttgactctttaggcgttcatcgcttcacccgtggcgcggcgcggcgcagcgtgctttactgcgaggatcaaaaatgacaaagagctttcgatgcttcgtttatactacaaagatgtctcctagccacgaatccgtttaaaagatggatattttccttgtggctgaggtgatcccgaaatgacattaaaaagtctgttcgaaagattgaacattgaaggaaatttccctgaagttaatgtcatagctgaggtctcagagtaagtttttaaagcatctggtacagagcgatgctagattttagcacaattcactaaggtttttaaagtttaatatccaagcttcctggtgatttttatgactaatcgagttgcttctatacatgttttactctctctcccgcactagaaaaaaaaaaacacattggatctagagtccagactcttgaaaacattgacaagaaaaaatactcttgattcaatcagatttttgcttacatcaaaaggaaatccgctcaaattaagaggcttggttctcgatttaagcaaaaatccgattgaatcaagagtattttttcttgtcgatgttttcaagagtctggactctagatccaatgtgttttttttccagtgcgtctatcaccagctctagtacataggcacgactaattgtaagctaatttttctccacggagtgcggcttcccactgcacaagagaaaaggtaaaaaaatgagagaagaacatcagatacgaagacatcatccgaagtagtatgtgatcaaattactcagggcaccataaaatgaaagacttatcatacttttttgctcaacaggttctggagttggagttccaattttggatgaacaaccgcatgataaacgtgaaaaaggacgggaaaacgtatcgaatggcgcattacagtgtcgaaacgtgcggacccaggccggaatcattcaagtaggtttaacctttcaatgaaaatattgccccgtttttttgtgaaatgtatttggcaaaaacgagatctaaaatctttggtaattttgcaaatggtagtttttgtcgtttaaatattcaagtatatttaaaaagccttccagaagtgaaaggtacgagatttgtgtttcaacgtatatacttccagtgagaattttctgaaatgtgctcgttcaattctaacccaaagctatatcaatcgatccaaaaaaaacctttcgttcctgtcaagttggacagttgctgaataatttcaaatatttatgtaactgtacaaatatcttgataaagatttccaagcagtcaacaactggaatttccttttaagacagcagtctgtattcgaccaaatactggattaatgatacttatttattgatacgcgatgattcaatacaacagtgtattagttttaagttttttatcaaatatttagtgctatcatgacgagaggaaatgagaggaaccccagaaaacttgaaacatgattccatcacgatattttacgaaattaagttgaaacaatagaactgctcaaactgcatcatccctttgaaccgtgaattagaagaatgatgaagtgctctactcaggtttgcaaaaatccgtcgcaccattttccataaccaagtagttaaaattttttcttataaaaaaaagaaattaaaagggggaaatgtgaaacttcgctcaattctagagaaaataactttacgaacgactaactttttagggaggatttcaccctggcgtcaaacctgacctctgatgaggagaggacaaacttgtacatagaactgaaaacagcggcggagacaggatgggacttctctcagagatggacaaaaactcctcctggacaaacaggtaaattctgacgaaatataatgtgtcatattgacactggtgagcggatcagaactttcttcgaagtactctcacctttttgatgcaatattaactctcctgtaactcgcattgcataactgttaaagtgcgggggaacccaacctcgggcaccggatgtgacgcgagggtcattttgagcaaataattgatcatatatttttgcgcttttatgccttgtttatagttctgcttcctgcttttggtcatctgctgtccatggtaaaggaaaaaacaaaatatcttctaccgacaccagcagcaattttgcgttcctccttttcttgctgcatttctgtagggattctgattcgctggaaaaatgaatcttattcaatatgataaaagtaaaaaattaatggtgtgatagtacgctggattaaaatctgtgaagctcatcgaatctctacagtttacatttccctaaatgcttcattgctttagtggatccgcaatttctccgatgtccaaaagcgggaacaccatgtgttcatgccatgacattcacacacgaaggcttttaagtttaagacatgtgctccaacgcatggaaactcttcataccgtcaggtcacaagtctccgttctatttcagaatcattgctgtacctgaaaacccgctccatcattccggtagatctgaacgcattcctacagctcaacgcccactacctgagcaactggttctttatggctggagacatttcgaaaggtgaatactacctgcagatcgcggaagaactgctcacggccatcgatgaggtgagaccaaactcacttattctaatttatttttatggatgggaaaaaaataaaatgaaatcaaagttgtccgtgcgttatatgttttgcgaaaaggaaagatgacagttcgtcatttctcggaggaacattacttcattccaaggttgcagtttactaaggaaaattaattgaataagtctgtgcaatttccgtccaaatttgtctgatttttgcatgagatcaaaggaaaaatccgataaattctccctggtaaaaattggcgataagagctgcgtttcaaaataccataggaattcttatagccggctaaagaaggctacagaaaatcatctagctggctgtagaatgcggagaaaatcatacggccgggcaatacgaagcgataaaaaattacgcagccgggctatagtgcctatccccgggctttacactttatcctctggctgttgctttttcgccatcgattataaaaggctataagaaattgtgtagaaattcgtgtgctttggaaatcattaagtttgatacggaaccaccttaatatttacaaaacacacattatattttcctttaatacatattttttttcatcaattaaatgagaataatccatacaggatgtgcaaacctttcaaaatcatgagttgtataacgctgactccgacagatcaaacactagagcctaacacaaagcggagcggcgacgctctggcgcctacaaacctaacagggatacttcacgcattgcgcaacgcgtgaagtattcctgttaggtttgtaggcgccaatgcgtgtttcgcgctggctgcccgcctgccacggcggcgcttgaagcaactatttcacaccagaggtattgcacagtatcatacgaaactgaaggcgctctaatatattagtaatagcaggcatccatcaaaagtacggagctttcctagcaaaataaatcaagatactacggcccaaaaagagagcagtattccaaaaactaactaagtcctagcatctgtaagtaataacgtttagcatacactttatcgcctggctgttgttgcttaatcgccatcggctataaaaggctataagaaattgtgtagccggctatagaagctattggaaatcttacagccggctgtaggtctatggtattttggaacacagattctactgccgatttttaccagggcttacttacttataaatgctcgaaattcacttggaaaaaatgcaatttatgagaggaaatttggcaacatcgaaatttagattccctctttcgtgagggaaactacgagtttaggtatggtatgatcaaaaattcacactgtaaggtgaacgtttggacggacccagtagtactcagagttttgcagaaatatttacttatttgagccgtattccaaggttcgtttttttacatatttcaatacaaaaattgaagttttgaagagcagtcaagatggcagatagtgaaaagaaaggcttcctcttctcctgacaccccccgtgattccccctcccctttattaggcaaaagttttggcgatgctgatgactgaaacctgtaacttagtcgttgggattgctattttaagaaaacttaggtcattcctactggaaagtgcccaagtagcacagtgaaacgaaaatattgaaattaaacagaaatttgattccaagaaaattgaaacttttttaccattaaaatgctaaatttttacttcatttagtggatttaagccgattttaaataattaacaaaatgagctccacgtttcagagagataggcagtatgcaatgcgatgaaaaatgcaacttatttcaattttattgcaagaagtttcaataaatggagccccttcaaataggagctgggcaacatacacaactctcagtggcattgcaatatttttaccatgtaatagttacttcttggaatctatgctacttcgaatataaggaatttgcacggtggtttctaccaaattgtaccaaaagaaaaagagaaatacgacctagataaatggttgctaaacaacatttatgcttatgaaaccgagaaaaccacgaaattgtcacgcaataaatttcgcctctttcgtttcatttcctcgcaagagcagccgcacgaaataatcaagacctcatgcgattaaaataagaaactttcagacaaatcagaaacttacaaagtagaagacatactcgtagttcctgcgtaaaaaatttgaagacgaacagaaattccgcattttcacaactcagcattcttcgatcgctccgaaagtttgccatggaaatacacatcggtattgaaacccctcaaagtcggggctattagatttgccggagttttccctcttggcgcgatactacagagcgaagacggatatttaattctattctggctgaattcagaatttccctaactcgatcatcttgcaccggcgggggaatcggctccttccgattgtctggtgcatacgtggtgcggtggtgcgaatgcgatagcgctccgatgcagggataacacaatagactgcaccatgcaccaaacatagacgccggaagtatcagagcatgcttgagagctttcaggcgctcgatgaccgagacgcggagagatcagcggcgtagtgtcctttgcgatcaatcgattcatctctcatttgaacctctggaaaaggatcgattattatcgaagtgctcggaacgaagagtcaaacaccgcaatactcgattcttgagttcttgaccgtggcctcggatgggaatatatcgatagtcaatgattcgagcttcgccagttggaagagatgtcgtgaattgtttaatgcgttgctgtctaatacaaccatgaactcgacttgagtctgggtacagtataaataaatagagtacttatacagggtgctccagagttaaacggccacactataaaaaagactccggccgtgggagccgcaattacggggtagatagacataccgtccgttccgggctcaaaggccgaaaattccggctgctggagccgtagcttcggcctctgaacccggagcaatcgtagctacgcctccagcagcaggaattttcggcctttgagcccggaacggacggtatgtctatatagcccgtaattgcggctcccacggccggagtttttttttcagtgcagacggcaggagccgaggctgagaaattggagaaaaatgacgagtagctgaaaaaatggaaccaattgatgcgatatatcgcatgccgttctgacacaaaatatggcgttcatcgaatcaccttaagatgcaaaaaaagattcttcgttgatctagtgagaccattggcggatccaccgagttgacaacattgtttttctccattgaaacctatggaaatgtatcgattcttggaggggccaggtgctccgacaataatagattattcaacataggtttaaacggagggaattcggtgttgccaaattgctggatcctcctttttgacgtccatgaggcgatacctccattggcatccaagatcgttatatactctcgctctcgtgatagaacttgacgatcgacctgcgttgtgcctagacggctatacgaaggaacttaaaaattagatcggcatgaccgtaggagctggcgcaagacactcgcatcgcgtcttttcggatgccatcacgatcttccgtacccttggcgcacataatttgataaagcgatcacgcgttgaccaattgagacacttgttctcgtcgattgtactcagcttttcaatcgattcctgacactctttgaaggtcgattcgaagccaaatacggaagtggccgaactctttcgcacctcatcatgactgtcgggaggtcatcgatatcttgtcgaacatagggagacccaagtagcatttttcaacggaaaagtcgcgatgttttgaaattaggttgcgatcttttgtcgaaaaaatttcaacgattatcaacatctgatcgtagcgtcaatcttgtcgaaatttcatctctataaaatcccgttcgataaaatctaaattttacctcaatttataacgatttttcgttcgaccattttgcgatgaatcgccgtcgataagatggcgattttattgaaaatttatgcgatggaatcgcaattttttatccgataatattgcgatggatcgacatcgatataatcgcgatacattctccgattaagtcgcaaattatttcaatcactcctacttggagcgcttcgagaaataatgttacattacgctcgattttggtcatacttgatctgaaagtaaaacatgcggcaagttgctatttaagtttataagggaggcgctcagctgtgtctgtgagattttggagtgaaaaattcgaattttggcacctagaatgatgagccttttgtgaggtgcaaatgttcgccttccaaatatgaatcgctaatcgtcaaatctgcacattttaaccactaaccgtaccaataatgaagcgtatgaatggacttgaaaagagtctgctgattaagagtgttcacgaaaaaaggaacaaacccttgattttttctcttcttcttcgaaaaatatcccacagtcactgaaatattctcaaaacagaatttgcttcaatttttgcttctgtcaaaagatgtttaatttgtgataaaaacttcttttgaaacagattttctaaccaaaattatcatttaaacaacagaaatgactgagagtagaactttcgtaaaatacgtggtctttcttcacacacttgcagtaaatgagagacaatgtatcgaaactggaactagaataaaccctaatcctcttctcccaagtagcacagtgcaacgaaaatactgaaatcaaattgcaatttgatttcaataaaattttacttttttaccattaaagtgcaatatttttatatcatttagtcgatttatgccaattttaaacaatcaacaaaataagggtccatgcgtcagagtgataggcaatgtgcaatgcaatgaaaaattgcaacttatttcaattttactgcaataagtttcaatagacgggaccccttcaaataggcggtataggcaacatacataacactcaatggaatcccaatatttttagaacgtatttgctacttattgaaatctgtgcttcttgggctgccgcaccacggggtttttcgagtgtttcctcccgtgatatttcagcaaattgcatcttcatctgttcaaggtcatgtggcgtgaagacttgaaatcgtggtttgattgggacaacgaggacggacagagcagagtagacttctacgcatccaacttgactccactctggaccggaagttacaggaaagcaccgcaagaaatgggaaaattcgccgttgagtacctggtgtcacagggaatcatttccgaggacggtatacctagatatctcggtaaggatagactttgagtgtcatttcaacatagttgagcctttgggtagataataatcctctggatagtataacttccagagtaaaatgcattatgcatcaatttcctgttgaagccaaaaaaatctaacctaccccctcctcctctccgatgaaagatttcacctggaaaattcaggagggggcgtaaagtgcgacgattggtatcatattttttatcactgtgcctctaaaattttgcaccctattttaaaaatactcaatacatatacagtattaaaatttacacaagtatttccctttacaattaacaattttttggtgggaagcaaagactattagctattctaggagatttttgagataattatgaagaagcataatttttaaaacactgtaatcacgctggttcctttttgctaaatgcgatctattaaaacatgagagatttagataactcgcacgcgatacgttgattcgtattcccggagtgcatactttttaagaaagaaaaaacgtaaaaatccggacctttaactgttgtaaacttctgtccactctggctatacactgagaaaaagctatggtttagaccaattagtgggttaatatggaacaccactaataatagtgaaggcacaactaattatttcccttctatgatttcaggaatcccgacaacgcttaagaatttcggacaacaatgggaagcaccaaacatgtggcctccattacagatgatcggaatccaaggcctggacaacacgctgtaccctaaggcgcaacaggttgcataccggctcggagcgaaatacttggagactaactatgttggtttcgttcgcacaggacagatgtttgaaaaggtaagcatttctgtctaaatcactggaatttgaagcgtgacacgtaaacaagagtggtggaaagaacatcggtttttcaaatcatactctataatgcaaaatcataagagtaatgcgtagcgatcaacgcttaaagcgcttctgggtgttggacggcgaagcggctaaggggcatagcctcctgtttgaaatggaattgaatggtgattctagctctaagggagcaattttaaaatgtgacaccatctgtagtgtcgagatgcaactattcctgctcaaggaacacacatggttgcgtacataacttaaatgaaggcgctttaagttttccagcgcaaaaagtcacacagcgcggaaacttgaaacttttactgaatgctgaaatcgaagtattctagaaaattcatcgaatagttccctctctaaaaataaacgagaagaaaaaacactaagaaaacccgacatgtacgtaacaaggtggagaaatggtgctgggttcacacaatttcgcgaggaaatcaaagccaagaagttccaaaaattataattagagtcaaaaataactgacgagtgtgatctgcgggtgaggtctaaaaagatcttaaccggtataggtctctcggcgtggctccaacaattgatattccaatgcaaattgcctgagctgaacaccccccccccacagttttgtgctggtactcattagagttaaaaaaaaaatttatttttgactctaattgtaatttttggaacttcttggcattgatttccccgtgaaatggtgtggacacgcactatttctccactttgcctaaaaaataaattaacagtgaagattttgtgacagcgcaattaagaaaagtcctttctgcacccaacgcctcaaatacattttgacagttagctatatcaaaattagtcaacaacttgtggctcttctactaatttcaccctcttctcggtatgggaaagagctgatttttcatttcctcctcaccgaactggaccctgatttttgttgcagtacgatatgaaccaactgggttctattggaggcggaggtgagtacgtgccacaaaccggatttgggtggagcaacggtgcttgcttcgaaattctcagccgctacgggcacaaactcaggagcccccaggagtaccccctcccaaactaactgcgaaagtccaaattttaagaacgatcgtggaatgacctaaaattactgacgagaccccctacgttacgggaaaacttcaaagatagcaaaaatattcgaggaaaatggtgttttcatggatgacctcaatcagatttgtttccaagttcacgcgtaaatattttgctagaaacacacatcacgactgaaaagcaatcaaacatcacttggctctttcaaagtgtttttggaatctagaacttattcactggaaatgcacagtgaaataagattacttagccgtgaccttcctgatgtaaatccgttttttacttgaaaagtaaatattatgaactatgatacacatatgagcgaaaaataattagtaacatttttcgcttcatttcctaaaatttctatacattgcttatcttggctacgaaaggatatgacacaatatatcagattgttctgaatgaaaaaccgatacgaataatgaaaatatgattatgataagaaagtcccgctcagttacttaaatagacaaaaaaatcgagaggtacgaatttcgccctagtagggaaaaaatcgaactaagagcaccttaaaataataacgaagcttttaaagttgttattcaaaaacaaaagtgaaaaactcatagttgcaaattgaaagaaacgaatacctgagcataaaaaacaagaagcttagtagtgcctttgcgtctatagcaattttttccgtccacgaatataaggaagcttttaaaaagctgattatatttttgtgccgctgttacagctggccgacactttaatatctctttgcgatgagaatctccatcacttaatgttaccttttaaattatttagttatagttgtttagctgcacgatcagaccgatctacccaataaccagcgaatttaggccgtctctaaactcaattccttgatagaaagacgtcactgtatatgttacgctattaatttattatttataattattattctgttatttatgcgttgtaaatatttaatttatttattaaaacatcaataaactgtacctgctatctgagaacctaatagttttatgatttagcgaactttaagagctaagtatgaactttctacggatgtcgtatcctcgcacgaattgatcaatggtgggcctagaaaaacgaaaatgtctcgatttgtgacgttgtacatctccttcaatgaaaaaaaccacattggatctagagtccagactcttgaaaacattaacaagaaaaaatactcttgattcaatcggatttttgcttgaatcaaaacgaaatccgcttaaattaagaggcttagttcttgatttaagctagattctgattgaatcaagagtactttttcttgtcgatgttttaaaagtctggactctagatccaatgtgtttttttttccagtgttgtgtcttcgaatctttgcctgctcagttagaccgcaatttgacttattaagatacgttcaaaagaatttattgagccctccccaggcgaggttttcccgcttattcttgacgtataatcctggaaacgtggatgaatcaaacttgcgcgacgtcgcttggaagattcagtgcacggtaagaaaaagtaaccgacattttgagttaatatgggaggtaaaacacgaaagaatccaagctttcggttcatcgattgacactagagtttccccgtctctctttagttttctgcgctaaattcacctcaaactacatcaaaatcaacacaaaatttggtttggtttatgtctcacttcctacattaaccaaaagtaacccaagaacacgaatatttttcacaaagtggaagcagggccggatttacctacatgccgcccatgggccgcctgtatttttccgtccccttctcatttgttttgaaacatcaattgatcgtattcgacagtggttcggtgtatcgtttggttaaaaacaacaaaacataacctcgaacaaaaatttaaggatttaatttggaaaagctgaaaatgagaaaatacctagcaatttcacttttcattgccatttggtactcgagagaataaaaattcgatcacataagacgcgttaccccagatttttaaattgacttttggggctttggttacatattgaaccaatcgatatcaatataatctcacctgtgtgatctgtcgaatacgatctataaaaaccatcaagtgaacgtgccggtgggggaggggtgtataagacgcgtttactcgtgttgggcacattttttgtaaaagccctgtcgcaacactaacaaaagttcagttccgtaaactcatccctgtttggacaaggccttccatttacaaaaaaagaacgaaaaaattatgaaagaactaacataaatgtggttgaaaattttaacttccactgccgcgccgaccgcactgtgttggcgcaatgcgtgaggtattcatgcagtcttgtaggcgctatgcgtttcaagccgactgctgctgactgcagtgtgtttgacgcaatgcgtgaagtattcatgcagtcttgtaggcgctatgtgtttcatgccgaccgccgcgccgctccgttccaggtcaaattgcgtgtttggtttttctcttaactcgactaattaaaggtgttgtctcttgtatcaccgaaaaacgacaaaattagaaattacaacacttttactctcaggagattagagattttgtcgccttttctcgtttgtaatttattttctgaatccgatttttttctgtctttttttgatacctccattcaaaaagattgcaaaatttgccgccccctaaattttgccgccatgtgctgcgtccccccccctctggccccctgtggccacccccttaatccggccctgtgtggaagatctgcatcttttgtagaaaaacttcgagtacgtaagccttacttacgtagaccatttagagaatgagggcgtctgatcttgccttcctgggtcgtacgtgggaaaaggggagtggcaagccctggctcatttaaaagtatggcatttaaggcgcgcaattcggtgacataaaaatccgtcaaaggaggtcggatttaatcatagtaaaaaattaaatgatttattaaaacaatcaatatctgagctgggaaatgttgcccagtgtcagagaaaagcgaataaaaatcgctgcaggcagagcggacacaagaaacaagacgcgaggaagttgataaaggcgccgggatgcaactattgctgctccatggatgtccttgttgcatacgcaaaataatgaaggcgcgctgcgctggcttttcataaattgactaaggttttgacggtgaaacgcactgcaacgacgcgaataccactttccgacgctggagacttcttgtcatcgtttattggttaaattgaaaaatactgcggtctgattgttgaaatggatatacaaagctacaaacaaagaaaacaaaaaggatatagagggatccgattggtggaagcccggtggttgcaatgggcaaaggaggtaggtaatagactaactaacgacaactcacgagagaccctttagttagtccatcatttacctccttagtctataacaaccacccgcaaattaaccaataggattgctccatactcattacgtcttctttgcctatagctttgtctatcaatttcaacaatcagcccgcagaaagtgatttctcggaaactgtccttatttacttcacggtgtgaagaattattctgtgcaaatttacagtcatagtaatagtccattttctttggaggaaataaaatgggagtagagatactgaattaccggaaacgagaggcaattttcaagtctcactgtcattatgtttacactgattagcttagcacgtcgaataaaagccgtgcaaaacgcagcttatccaaatcctcgcaataaatcgactcggcataatcagtttgattattttaggcagaggttaaagtagaaaagctggcgtattgaaacgaataagggaaattcatttgcaactgctatcacataaaatggccggatttatgggatgcatctacttgctaattcacattaattcagattctcgaaggttcagcagtttgcgaccacagggcgcatccttcattctccccttctccatattcttgcgtcctgcattatatcttcaccatgcatggccatgcacccgattcgaatgcttgcaattacgctattctgtcttgttatttcacaataatagagagaaggtagtccgtcacgaaaaccattagacaagatcagagctaaaagagattaatttgcatcgcaacgctgcaaaatttcgatttatgataaatttatttacctactccataacaattaaacactctttcagcttatttctcgagaatttttctcgtgttggaatgaaagttctaaacagcgttttggctcacatccgtcatcatgcattttcgaattttgaaaatttgaattgaaatctaagtatccagttgaaaaatgccacctgacatcaagtttcacaaaaatcaatcgaacagaagccgagtcaaaggatcaggaggacgtttcccattggtaaacgataccagtcaatgtacgtgcgttggagcgccttcattttcgtttgagcctgtgcaacacttccgaggtggaatagttgctcagagcgcccttgacagtgccgcttcgccttgatgggagaagatcacggttaccgctgatatcacactctagcgcgtgttcggtttcacatttcctcatcatcgacggtgagattacgttcatacttcaatacgcgacgttgcaagtttttcatcgtcaaatagatacgggtaaactgacttgaaaacttcaaaatctgccgtgatttttccgagatatgatgagaaatattctttcgatgttttaaacagtaagagcaaaattgtcggtgctccaatcttgttctattcattcactggcggctttcgagttgcctgcggcgatagaaaacgcctgtagaaaaccttcaaaattcaacaaaacaacacaggaaatgtgtcattcaataattttttctagtttcattaagctctcccgaatttcttccatatttttcttgtgcagttttgttgttaggcaaaatgtttctacgggtcttaatgtctccttggaaattttaaaaccacctattgcgacacacacacacaaaaaaaaaaaa

SEQ ID NO: 24 - DNA, 15453 bp, Bemisia tabaci
  source 1..15453: mol_type = genomic DNA
atctcgttctgcgatgacggctgtgagaccctactacactatattgaactatgctacattatactatggtataccatactatactacaaatatttctatattttaaaggagctcatgcatactaatcacgctcatcccctcccagtcacgctgaaattatgtcaaccagtcaaaacatgatcaatcaatcaattagccagtattgatccaagatcagttcctggatgcaaagatttacgccttttttggttccttcctaacatagtgagaccaaacgtcacacgatgttttccttcttcttcttttctttttcttttattaatgtttctgtgtcgttttacatttgagtatccttcccagaccgccctttgcgatcaatgtaagagccaccaaacatttaaatgctatattttcagagcagaggttgataaaaggagcgtacgaaggttttagtctcaaatgaatcagtgagaacaaaaacacaccaactcggtaactcgaaaatgctcaatttccattaaagacagttaatttacatagagattattcaagttagcgcatctgtcccaacttggaccttcaaagttcccataagtacttgtctttcagcagcaaaaatcttcttcttgaagtgacttcttcacctaccgtgcagttttgagcgtgtcttgattattttcatttttccgagttgctgtgttttcgtcctcactgattcaaatatagatcgtatggacgtcttgcaggaagtgaaaattcgaaatttgttagaatttcataccagtgtatggcattgcctcagaaaatacgcggtaccttaatgtctggaaaatttctgaaggtaataattaatgccggcaacaccgtcttgcaccctaatttggtccctttatctttacagttgtttcgcaagtttgccgtcggtgataagaggcgattaattgaaagctggatgcgacttagtcaaataaatccagggcgtcaatcagtctgatattgtggtcgctaatccagattgtccttgtagagtcgctttggaatcctcgcggtgtaaagttggtcttttcttgttcttgtcttttcccgagtcacccccgcagatctgaatggaggacatatcatcttccggcgaagaaatcagcatgaaaggtaaagttcccttaagcattttcggaggagtaaaaaaggagtttcgtgtgcaatgtgaattcgtgtaaaaaattaaagtggaaacattgtaatttaagtaattacgaggcttaggagcaattctggggtcacttatacgaagtcaaaacttacattaagtttttacaagtagctaagtaagggttggagtagcggagtgaaaaagcttgccacagtttggagaattttataacacgcgcatcgacatttcttattcacctcaattttaagtcggtaacggtattcagtaggttttttctgatttcacttaaaactttattacgcattttaggtcggaaagtttagaatggcctttgtacaaacaccaatcgcgcggtgaacaagcacaatgtaagtacccagatctgaagaaacaggggtagctgtaacaaaaggatcgttaaaattaagtagcactatttgaagatacaccccgaataactctcatccctcaatttaattaactccagtggggtgaatctaagggaggtgaagtttttgaatttcatccttttgtatttttatcatcatcatcattattatcatcacaatatataattccgtaagcccgatctttcaggtcaaaattcagtgggaacctccgggccgatccaggcacgtgctgccgtgctaaggaagaacgccgtatgaacattcgagagttgccaaatttacttcgataaaatgttcaatttctaagaaagttatgaatattttttcttgaaattttcagaatcttcaggtgaaatagtgaacaaaatgatctgaaaaattgggaggaaaatattcacaagtttaccagaaaattcgcgttttaggaaaggaaatttggcaacgcctgaaggttcatacggcgtttttccttagcacggcagcgtgtggcaccggcttgaccgtcccggtcccccgatggccggaaaaatagagggatcgcgcgggttgctccctttgaaagatcgattatcccgttggtcccgtcgggagatgcgcgatttttcgttaattcagggcgctttttttggatgagttgataattcgactcctcgaggcatttgtcatcctggaaatcgccgtgaatgatgaatatacggcggaagcgttcatcaaaattttacctaaattaacagtattcacacaacgagaagttcggagatcaacttttgaacgaggtataaacaaatcgatgaccaaagtgcgaagcccgcggatctctttttgcgacgttgcagaggcaaactccctgccaaactcaacgcaatttattaaaaactatcttgatttttttcgcctttagcagaatagtctatgtatgtttcaagctataaagtgtacgttagcttctatatcaattaaaaaaaaatgaaaaaatgagtgaacaaaaacaggagaatttccctaatctttcgctcccaggattgcaggttcgcggtgtgaacaccaatatgcgacgaggatatcgatctctcgacgtagagctcgaaggatcaaaatcctaagcctagattaactccgaaccctgataataacgttttttatgaataaattcaacctttctgctcatggaagaaaaaataatttacttgggttaaattgcacgccaaacttcactatgacagtcttagtaatatgaaaatatggcaaccgcaatcttgacgcttagctcaagctgtacacactttgaacaacacagcgtaggacagaaacaatgatcgattgagtatagtctgctaaagccgttgtagtgcgcaatttgactcgcgtatggttttgtttttcttttgaccgggcaattctaagttcccgtaaccaatggacagtaaaaacgttaatatctgaactagaaattgaatccagtagttttagtctcgagaattgtgttctgcgtgaaattctggtgaagaatcatgtaacagagtgcttaaattcgtaccttgttcaatggtcccttcaatctaaaaaagcgaacatacggaactttcctaacttttcttagagaaaatattgtattgggagaaactaggcaacgttggagtgctcatatggcgtcgaaacactacatgggccttttaagccccattgtttgatgccgcgattatcctaatagtccaggcaattgggcatcaaataggggctcttggggaaaatttcccggaaaactttttgatgagtgattcctatgtatttttagacgctgaatccgaatttcgcatttgtgtaaagatcttttcgccgctaaagccgccattttgaaaaaatggcctaaaaatggcctaaaatcccaatttttgaaaatatctcgcttatttttgattttttgaccaaagtagttattttcaaaaataaactacataaaattctaaagaaaacaagttcttatcaattttttgatatgactgaaatttaagccgccagagcgcgctgaaaaaaccgccgaaattcgaatttcgccaaacttgcgcttttctcgtgaataacttttctcggggtgactctacgtgaaannnnnnnnnnnnnnnnnnnnnnnnnnnnnnnnnnnnnnnnnnnnnnnnnnnnnnnnnnnnnnnnnnnnnnnnnnnnnnnnnnnnnnnnnnnnnnnnnnnnnnnnnnnnnnnnnnnnnnnnnnnnnnnnnnnnnnnnnnnnnnnnnnnnnnnnnnnnnnnnnnnnnnnnnnnnnnnnnnnnnnnnnnnnnnnnnnnnnnnnnnnnnnnnnnnnnnnnnnnnnnnnnnnnnnnnnnnnnnnnnnnnnnnnnnnnnnnnnnnnnnnnnnnnnnnnnnnnnnnnnnnnnnnnnnnnnnnnnnnnnnnnnnnnnnnnnnnnnnnnnnnnnnnnnnnnnnnnnnnnnnnnnnnnnnnnnnnnnnnnnnnnnnnnnnnnnnnnnnnnnnnnnnnnnnnnnnnnnnnnnnnnnnnnnnnnnnnnnnnnnnnnnnnnnnnnnnnnnnnnnnnnnnnnnnnnnnnnnnnnnnnnnnnnnnnnnnnnnnnnnnnnnnnnnnnnnnnnnnnnnnnnnnnnnnnnnnnnnnnnnnnnnnnnnnnnnnnnnnnnnnnnnnnnnnnnnnnnnnnnnnnnnnnnnnnnnnnnnnnnnnnnnnnnnnnnnnnnnnnnnnnnnnnnnnnnnnnnnnnnnnnnnnnnnnnnnnnnnnnnnnnnnnnnnnnnnnnnnnnnnnnnnnnnnnnnnnnnnnnnnnnnnnnnnnnnnnnnnnnnnnnnnnnnnnnnnnnnnnnnnnnnnnnnnnnnnnnnnnnnnnnnnnnnnnnnnnnnnnnnnnnnnnnnnnnnnnnnnnnnnnnnnnnnnnnnnnnnnnnnnnnnnnnnnnnnnnnnnnnnnnnnnnnnnnnnnnnnnnnnnnnnnnnnnnnnnnnnnnnnnnnnnnnnnnnnnnnnnnnnnnnnnnnnnnnnnnnnnnnnnnnnnnnnnnnnnnnnnnnnnnnnnnnnnnnnnnnnnnnnnnnnnnnnnnnnnnnnnnnnnnnnnnnnnnnnnnnnnnnnnnnnnnnnnnnnnnnnnnnnnnnnnnnnnnnnnnnnnnnnnnnnnnnnnnnnnnnnnnnnnnnnnnnnnnnnnnnnnnnnnnnnnnnnnnnnnnnnnnnnnnnnnnnnnnnnnnnnnnnnnnnnnnnnnnnnnnnnnnnnnnnnnnnnnnnnnnnnnnnnnnnnnnnnnnnnnnnnnnnnnnnnnnnnnnnnnnnnnnnnnnnnnnnnnnnnnnnnnnnnnnnnnnnnnnnnnnnnnnnnnnnnnnnnnnnnnnnnnnnnnnnnnnnnnnnnnnnnnnnnnnnnnnnnnnnnnnnnnnnnnnnnnnnnnnnnnnnnnnnnnnnnnnnnnnnnnnnnnnnnnnnnnnnnnnnnnnnnnnnnnnnnnnnnnnnnnnnnnnnnnnnnnnnnnnnnnnnnnnnnnnnnnnnnnnnnnnnnnnnnnnnnnnnnnnnnnnnnnnnnnnnnnnnnnnnnnnnnnnnnnnnnnnnnnnnnnnnnnnnnnnnnnnnnnnnnnnnnnnnnnnnnnnnnnnnnnnnnnnnnnnnnnnnnnnnnnnnnnnnnnnnnnnnnnnnnnnnnnnnnnnnnnnnnnnnnnnnnnnnnnnnnnnnnnnnnnnnnnnnnnnnnnnnnnnnnnnnnnnnnnnnnnnnnnnnnnnnnnnnnnnnnnnnnnnnnnnntgttttctttagaattttatgtagtttatttttgaaaataactactttggtcaaaaaatcaaaaataagcgagatattttcaaaaattgggattttaggccatttttaggccattttttcaaaatggcggctttagcggcgaaaagatctttacacaaatgcgaaattcggattcagcgtctaaaaatacataggaatcactcatcaaaaagttttccgggaaattttccccaagaacttccctattgcctggactataacgcgagttcaaatattcgtgccaaacattgtgtggtcggcgtcaaactcatatcagcgcctgcaagactgcaggaatacttcatgcattgcgccaaagagtacggtcggcgtcaggcgcatgttagcgcctacaagactgcatgaatacttctcgcattgcaccaaacgcaatgcgagttatttgcggtaacattcgactacaggtataggcacacggccgctggttgctggattgagggcgtatcacactgtgagaatgactcgacactagaccgcactccctttcctggcttgcgcgacgctaaaatcgcctgatgaaaaatttagcctgatgtcttctttttatacgtaagaccgagaagtggaagcagtgaaagctacgttcagtttatcttaaactttgtctcataacataaaacttggactgtttcagcgatctcaaaagtgattggagtgcccgatattcgagatgggcccactctcacaaaatgcatagttgctgagttcgtagggactttgctgttagtactcataggatgcatgtcggtagcatttgtccatcaggacaacttcgttgacgttgtgaaaattgccatggctttcgggctcattatcgcctctatggtccaggtaggccaataaaccacgtatcccgaccttttgatttggtacattttaaaaaggttcatgaaagatgagaagtgtggtgaaagtggcatgaaagtgtcttgtgtggtaagtgaggaactattaatcctgaattgaatgaaggaacggaaatgtttgactaaggaaaacggcgacccgcaaaatcagcacagatttaacattcggacccaagaaatttttggaatttttcggacccttgtgtttttgctcgttccttgctggtaacctgaaccatccatatgccgccaaagacattaccaatggaaatgggaagcgatcgggaagagctcccccaaatggaacgagcccaaaaaggaacagtgaaacttctaggtcagagagcagatggagcgatgaaagcttttccctgtcttaaacgaattttgagcgagcaatattattagaggtgcatcattagtgtcaaagacaataaagaggtcacttaatgagattaaatgccaagcgtggattttcaaaggcaaaaaatgaacgggaccaggtggaggcaccgcaatcacgatgcttcgttgccaatttgccgaaaatagccgcagaattgcctgcctttctaccgtgctagggaagaacgccgtatgaacattcaaaagttgccaaacttccttcaataaaatgctcattgtttaggaaagttatgaatattattccttgaaatttccaggaacttcaggggaaattgcgagcaaaattatctgaaaaattggaaagaaaatattcataggtttaccgggaaattcgtgttatatcaaaggaaatttggcaacgcctgaaggttcatacggcgtttttccttagcaaggcagctttggtgtaaaatgagtgactaccatcgagatctgacacaagagacgaggtggcattaatgccaaacagcgagtaatatttcttggaaagatccgctttccgctctccggtgcttattgacctgcccctgtcagagggatcattttttaccgccgcgaaagttgttaactttcttccgtagtgctttgccccgccttcatgatccatggtcgacaaatgaaaagtttcaaattcgccaacagtcaatgtaagtttcgttaagttcgcagccggccttgatgcgttcccagttgtgaatttactctgtaactcgagtatccttccatacccacttcaaggttttaggttgccaggtcgcccgatacaatttgaatattttgcatggttttaaatggagaaaagtgctgattttcagcacaatctggatacaatgtaaagccctcagccctcactcaatgagttcataataaacactgacaaaaacacagattaaattgtccttcaaccaacttttctccactcatcgtgccttcagttgaattttgttttaacgtcatcgtttttatacacagccctgaaaagaaacttggaggctttctgaattttttgcatagtttttaatgttttaagccattgcttaccgtatgaatttttatttaaaatgaaccagccccaaaattgtgttctggtggttggcacggaccaattagtattattatagcactgtcacgttaaagttttacttttcgcccttaaaatgttatattttttaaaatatttcaggcaataggtcacgttagtggttgtcacatcaatccggctgtaacttgtggactagctgtgtcgggacatgttagcataataaaaggtatgctgtacattgtcgcacaatgccttggagccatctgtggagcaatcattctgaatgtaagacagtttaatttgtaaaagttgaactattttagtagattccaagttttaatgaccattcgttgaattttttatttttaaaaaaatccaacacgcatacaaacctttgcaacggacttcaatgcagctaaaaacttttgcagaattaaggagttccttcataggatgcttcagtaaaagagattacgagtcgcctttctctcgggttcaacgtaacccaaatcgctggcaaaccttgacggacgtccgaatatgtataactcacaccaatgccatttttattgccattacttacataggtattaattatggtcaattagacaatgatattgtcaaagtttaaaagattttggaactttaattttgtacatatacatatcgacggtgtgagtcagctaacatctaactcgtttgcggtgtctgaaaatctccgcctccatgttatttttttaaaggagaacaaattgacataattacttagtgtttttgcagaattttctttgcacagagtagaataattacggcagttttaaagaattgccgttgagtagttttctgtttaaaaagtaaagtatgacaggaagtctgcgacgtcgcaaaccgagttatgtgattgccgacttgctccgttgatatgtctctagtgagtattgatctgctgtaaatggctcaaccctctaataaatccaatcatatgttaaagcaacaatgctaatccagaattagacggcgtttagcaggaaggaatcaagccacatcaacaattgccaaaaactgagcaattaaattttttataacagaacgtttgtgcagattcctttgagaattttaaggaatttgcttcgtactttgcagagaattcactgaaattttcacacaaatctacacaacggtttccatgtaaaaaattaaattgcccaactaacttcgacggtagctgatgtggtttagttccctcctgcttgacgcggtccaattacagttccaatttcgcagaattcgttcctcgagagttccgttaaccacctagggagcagaccccctattttcgaaaaaaagctcgattccctcaccctaaacactgcctaaaagctttattcggtgaaaatgacaatcattttctccataattcggagagccctggaaagagagacatttccgtagaaggaaatacctatgcactgaaagacacgtcaagatgaatgaaccggtatccccgttcaacgatgcacaagcggaatgttcactgtggagacgacggaattccttgatagaaatgcggatcaaatatttgtcaaaaccagccctcagctctcattgagctccgcaatgacatcctcccgctttttctgagggtctgacatacgcacccacacccagatgggtatctccggttccatctgtcatcctccgtcatccatcccgcggggcgtgcatttcgttgatcctcagacatgagccctggaaagcatgggcgaacatgggcggtggggctcatccctaaaatgaaatatgcccttacggtaaaggaccgacaatttgacgccaatatccggagacgcgcgcatattcacttccgtgacgcctcggagcttcagttaatccatcgcaattccgattgggaatggaatattttgcgcgggcaaatccataattccgattgaactcttggataaaattgtttcaaagtttcgttcaaagcaggcacagttgtttgagacaactagaaaggagtggcagactagagtccttttatactgagagtaaagacaatgcgaatccattcctgattggttcccgtattttaggcctccacagtgtcacaaacgggaataaagattacattttcaccaattgcaaaaattataaactagaatggaccgggacatcgggggaacggcaaggaagaaatggaatgggagagggaacggagatgggaattcgaaatgggttgatcaaagattacaaaaaacgtccgatttttgtaatctgcattcccgtttgtgacatccatgagccgcgttgtcttaacactctctataaagcggctctgtggcagactaaactgccgtgctaaggaagaacgtcgtatgagcctcccggcgttaccgagtttcctttgataaaatacgaatttattggaaaagttatgaatattttccctccaatttttagacaatgtggttcacaatttaatctacaatacctcaaaatttcaaggactagtatgtataacttcctcctaaaataaacattttaacggcggaaattcggcaactctcgaatgtacgtacggcattttcccccagcacggcagtatagagaaaatctgaggagaggtaactgttgaaaatactgactgggggttgtgagatatccaaataatgcgcaaaatcgtgaagcggctttgcatgtcaattttgcaaataagaaactgaccaacaattttgactgctgacaaattggagtgcattaaaatttacagacacgaattacatgaatttagatgagagttcaaggagggtggtggttaagatccaccccttgctgcagtggcgtggagtgcgctttgagataaatcgattgatctgctattgaaacccatggaaaatgatcgattaacagggtgctcgcaatgaacacattaataaccgatattttaccatggcttcaaaggagggaatatcgataatcgatcattcatggtgaactctatttaatcctaaaccgtaaaacatgtgcttctataccctcatgtgcaatcttccttttctttttttttgaggaaaataaagacagagtagactcggttatgggctacatctttgccatgacagccttgaatctattaaaacgttagttgcagtaaaagagctctttatcaacgtgtaattaagatccaggtgcaaattttttgtgatagtgctcgataattgactggtgagattatgaaactaatggagggataattaagtgtatgggatcacgtcgtggttcatatcgctcaagcgttcccggacaagaagaagattcaatgatgaagccctcattcaaggacagaatcgattcgatgtacttatattacacgattgaagtcattttgataagatatgctttctgacttaatagttgatgtgaggaaatttgactatctcagaaaaccgttcactcaagaaaatacatttttttttaaaattgtccaattttcttcattcaggtgcatgaatgtccgttgttataaacagaggttcattataatgtgaattggatatcataatattcaattcccggaggtctataaaacccagagtggcatgaaatgtaagaaagaaatgaaagattggaaatttcagtggaaaatttcatgaaatttcacaaggctgtgaaatatttcatatttttcagggcaaaagtatgcagcccgcactcgaatacacaaaaatataagaaagtcacaatttttacatgttgtgaaacatgaaaaggaactggttttttcaataccttttttaatgtgtgaaatttcatgtgatatttcacgtgaaaattcaagattttattttttatgaaattttgccaccatgatgaaaccgagttaaaaagtgagttgaaatgttgtgaaagtttgtacataggggtgatttcacgataataggaatagtcgtgtcgccgtgggttatgaacgacatagggcaaaacgattgaaaaccaaattaattaatcaataggaatgatgtccctgaacctatccatgttgaaaaatatgatgaattattattattatatttaataatatgagactttaaaggccgaaaatgtccggtcggttacgcgtcgccaaccccgattttgaagcaaaagagcaccaggtatgataaatggagtatcaatggtatgataaatggagcgtgccaaagctggaaagaggaagtttaatacctttaaaataaggtaatgaaatcctgttaaaattggtgcacttttatttctaaggtatttcacattttaactattcctgttatcgtgaaatcacccatatattctgtcaacagattgacagcatccttaatgtttggttgtggtaaaaattcattaatctttgaattcaaatttagaaatggtctcattacaggatattaaatttttattaccggaatttccttttcaaagcctttgtagcaatgacgttagaccagtgaaatcgatattgcatcgataatattttgagcacgcatccaaacacacaaagaacccagctttcagagagcttcttgtgaggatccgctcattattcatttctctagcatccttatgtaaaaatgtaatgcagctacattgccctgctaaggaggaacgccgcatgaaccttcgtgcgtggtaatgtagcatcgggtccatgatcttggactccatgatcacttatataatgttaggttgctcatcacgtccaagatcttggactccatgctcactttgatgagggataattttttagaaaaatcaaagtgagcatagcgtccaaaattgtgggatgcaggtattctctgacaacacacgagcataaggtccaaaagttcatttagacaatttttgtgaaataaagacgaaaaaatgtgttttcgtgacacattgtgcattagttttgttaggctgagttaggttaggttaggttaggttagttcaagctagatttgatcagagaaatttacgattttctatcatgatgaactttaaaactaaaaaaggtctacttgctattggactccatgctcaagcaaagaagtgaaaagcttagcgatgagcatggagtccaagatcttggacgagatgagcaggcaagtatattaagggtgagcatggagtccaatatcatggacgcgatgctacataatcttcgtgcgttcccaattttttttcgataaaataagaattttcaggaaaacttgcaaaaattttccgtccaattttccggaggattttctttgcaatgtgatgtaaagtatcagagaatctcacgtagaaatattcattacttttcccaaaagtaatgttttaagagggggaatttggcaactctccgatgttcatccggcgtttttccgtattacggcagtacatgcatgccccagataatattgaaccctgatggataagatctttaacaatgcgtattatatctatttatgtgactcaaatatgctacaccaaaaaagaagttaagttgatttaacattctggatgtaaaagaagtgtgcgataactcgtaaaatgctgagttacccgccaatgcagttagatttacatcttggcattgctaaagtaattgctgtagcgaataattcagcactttataagttctcgcacaccttttttacatccagaatgttaaatcaacttcacttttttttcggtgtagttaataatcatgaattttcccgtgtttaacaggaaatcacgccaaaaacaggttacacggctgctggtaatctgggagtaacgacactgtctacaggagtttccgacctgcagggtgtggcgatagaagcactaatcacatttgtgctgcttttagttgtccagtccgtctgcgatgggaagcggaccgacatcaaaggatctatcggcgttgcgataggattcgcaattgcttgctgccatctcgccgcggtacgcctctcattagattatcctttggcttttgtcatttcacttaccgctcccactcagccttagaacgtcttacttataattagatattacaacccacctacagtttcctatgggaaaggataggaataaagagagtaaatgacatcacatgttaaaaagtggaaataaacgcacaagaatcgaacgttatacatgattgaaaatggcttctctttcgacgccgccatgttttgtgggcgtaataaagttaggattctttcttttgagtatttcaaaaatcttgcgtgatattcgacaaccgaatttcaagtcaatcaacggacaaacacagaggtagagaaactcaccagtcaagcaactcaggttactaaccttcgatcaaccgagatgacgtgatgccagggaaaataataaaaacatctggtcttgagcctcaagaaatttacatcacgaatacgcacgttgaattttccttgctactggtttttcagatcaagtacaccggtgctagtatgaaccctgctcgatcattaggccctgcattcgtcagtggaatttgggacaaacattgggtgagtgaagaaaattgtatcaaattaataaaataatgttgtattcaatcaatttcatatctcgaacaacattgaccaaacaatttgtccattgcgacctgttaggcatttttcctccgtcaaaaagaagatttaattacaaaatttggtgattcgatttggggcggtgtaagtaagctaccagtccgccccagatgtattttttaaatggaaaactgatcgctctttttccataaacttccttgatttttcttttaagtgtgagggatgctttatgggaaaatttgataaaaactgtttggtctttctatttactttcttacgaacaaggatgggaatgatgaaatcttgtattactcacaatacactgttttttaggcttcctctcggtcctttcctttttgataatgaaactgaaacaacatgacttttgatcagaaacgttgcagatttcctgtcaaattttattttttaaatgagaaattacttgacgtcataagtaaaaaacctcacttctggtaaaaaatgtctctaaagtaaagtctctttttaaagtatgttcggagaaaatttcaagccattattttggctcatttttcttataaaatgaaataaaggagcgaaatttttaagacacattaaacaagatacgattttttatagtttcactgacgacttgttcgtaccatttatcaaatacatcaatacttttaagatctacattcacatttgaatgtggaaaaaacagaataactatattagtcgaatattcacaggatgataatcttaatttccccctaaacaaccatgaaattcttatttgtcgtgttttatagaataggtacgaagattaggtgtatgattatgagttttcttctattaaattcaatagttccattgctcgttgagccgttgtttaattttgttttatttcgataaatatgtctaaatcctctaaatagataagactggactttgtctcattttaaatttgtcttacaggtgtactgggccggtccaatactcggtggagtcactgccagtctgctttacgccatcactttcaaagccaaaaaaagatcggatgagagctcttatgatttctgactctgaaaacaacctaacgataggagctatcttccatgtaaattctcaataatctcttgttaatttcgcgcactttgttaacctttgcgtgtggagta

SEQ ID NO: 25 - DNA, 125465 bp, Bemisia tabaci
  source 1..125465: mol_type = genomic DNA
gcttgtgtgtgttgaaacgtgtaaattgataaaagtatttttatttccatgttccccgccttctgcctgattagttctttacgacctcgttcaaagttctcaccgctgtggtagacgaaaccgaaactttgaaactttcgccgaaactcgtgaattgtgcgctccagatttttgtgtgtttgtgttccgaatttctgcactcgtaatctaccgtttctcgtaataaatctcgctttgttatttatctaccatacgtttccgtcgggaagccagcgtttttgtgttcatagtgttcggccggctctaacctcattactgttgtgttcagcgaagttcctctatttttcgttaattcatacctgataagtgccggtccacgtttatcatttgtgttttcagtgtaactatttccgaatttataattctggtgtccgtactctctcatctggattataagctgaagtatgtgaagcagttggtaagtttcctccctatcatattatcttccttagatttatttgtacacctcccgggtgcagcattttcgacggaactgaggcaaatatattttacttcaaaaatcaaagtggaccacttcatacaatgtctcatatagagtaaatatttccccctgaaatatgtgcactcattgctggtttagaccatgtgttgaagtcagtgtgcatcagctgcagtatgctccgaaaatctcagacacaaggcacaagtgcacatatggcatcagtactataggtactcaaagatgctatttggttgttgtcaggtgttgagttcacacacttcgtgttggagcgctggatgcattctttattttcagcacgattatatttcaaaaatagcaaatatcgaacaatgaacaaaatagtatcatcaatagcattaatttcttgcaccttgagaattcatatttttattgatctaggatgaggaaaatgggaagtccagatttaaagttcgacggaagggatgttccttaaaatccggaagtgagcttaagtgtcaaagtccacagcaagctccgtttcatcaccattttatcccatactctgtagctttttcaggtcttggaaaccaggaattgtcagagaatagactggatctttaaaaaatcctgaaatccttcaagtctaaacttgcgtgctggctacgcaatcataccgagtctcactacctattgcaaatcaagtgctatttgtttccaagttttttctgttgagccttatactccctttagtgatcagttaacaggttgctttaagtaatccagtttattctgtgctcagctcactgaggttttacttaattacatatttccgcatttgctctaactaaattttgacgttatgatcaatagagggagaattttaggaaatctcccgtccccactcagtcccgtttgtcggttatgaaatccagcttttccgtttccccaaaaggaatctccctctcccccctttttacaatgtatcttatgcagctcaccatgagcacaccctatccttccaacacgtttcgttcagcagaaatacgtccacttcttacgtatactaaggaagaacgccgtatgagccttcagacgtttttatataccctttaataataaacggatttactcggaaaattctgaatatttggaccgcgtcaaacaaaaaggaaccaagccacatcagctgttgccaacttgaagtaatttggcaatttaattttttacatgaaaacggctgtgcagattttcgtgcaaattttggtgaattttctccacagtacgaagctaattccgtaaaattttcaaaggaatccacgcagactttctctcgtaaaaaattaaattgcctggttaaatttgacaatagctgatgtggcttggttcctttctgttgaacgcggtccatttacctatccttcaatttttcagaatatttttcgcacaattcaatctaaaatacctatctgaaattttcaacaaaaaaaaattatgcataacttctctcaaaaataaacattttgtcggaggaaatttggcaacagcagaatgcttgtatggcgttctttcttagcacatagagtaccctatgccttagcacggcagatttttcagcgaaccgaacctgacccgctgaaacgataaaaccgatcttacagaagggaaatttggtgtctgtcagagccggattaagggggtggccacatgggccgcggcccatggcggcaaaattagggggtggcaaattttgcaatttttttaaatgcaggtacaaaaaaatcggattcagaaaaaaattacaaacaagaaaaggtgacaaaatctctcatttcctgagagttcttcaatttctaattttgtcgtatttcggtgatacaaaagactgcgcacctttaattcgttgagttaagagagagaccaaacacgtaatttggcctggagcggcgcgacgcaaagagaaatgatgacgaggacttgatatgcaaaggagaagccctcgacgcggcggtcggcatgtaacacatattagcgcctacgagactgcatgaatacttcacgcattgcgtcaaacacagtacggtcaacagcggtgggcgcggcgtgaagcgcacagtgcctacaagactacatgaatacttcacgcattgcgccaaacacagtgcggtcagcgcggcacggcagcggaagttaaaattattaaaccacatttatgtttgttctttcttaattttttagttcatttcttacaaatgaaaggccttgtccccacagagataggtttacggaactgaactttcgcgcgaagttccgtgaacttttgctagtagtgttgacagggcttacgcaaaaaatgtgtccaacactagagtacctgtatagggagagtagcgacagattggttcatggagggcttagggcccaaaagtgcagccacccttctgagcaacttctaacacacaaaatttcactgccagcctacagatttcaattctaaccaagatggctaagaatgtatataaatgagcgttctttcgcaaaaataagtaaatttatgcaaaaagtaaaccaaatacatgctttctaaacgacggttcgtaacaattgtatttgtaaatcgctctggacattcgaaattcataggttggctgcccttttgggccctaactttattcgcggaggcatcggtgaaggcctgatggactttcggagtttcagatctgtcgctactctccctatacaggtactctatccaacacgagtgaacgcgtctaatgcacccttctccctccggcacgttcacttgatggtttttatattgatgtttcaaaatgaatgagaagagggcggcaaaatataggcggcccatgggcggcaagtaggtaaatccggccatggtgtctgaagggggggtggagataggggttaattcgcaattgcatgaccgccgtgatagggggtgtgttggctgtctggtaagggagaagccagcagcctccctcgtaagtcgagaattttgcaccgggcggatcatgttcgctcatcaagtgagattagcgaattacttgccagaccactttcatacggcttccctagaggtgttaacgagtttgtccgccgagctttagccgggctaaacttgtgggtggagattatcgccgtttttagagccaattttccagactacatcttgttcccgagaacccgggttatgtaccgtaactccgaatttttgcagtcagcaagcggacggtgacgcagcgatattggagctcttgcatgtctcaggaatttgcgatttaggtattgattcctgtgtaaaatttcgcgagaaacacgatggtgccactagttttctctgaaatcaagctcaaagaaaactctcgaagttgaggctgtaatggaggggctaccccaaaagttcacttttatatcaagacactttcggtgcaaagatagaaagcaaatacattagcaagggttgccatgcttccagttttggagttccctaaaattgacaaccctataaatttatttgcccctcatcgttgcatggagagtttgacttgattggactctcgcggtagcgtaggatatccccaccaatacggcctcaactttgagagctttttttgagctttggtgtcaatttcagagaaaaccagtggcaccatcgtgtttctcgcgaaattttacagtagaattagtactcatatcgcaaattcctgacaaatgcaagagcttcactgtaataataaatcactctggataattttaattcatagtttgcctgccgttttgggccctataagctccatgacctaacctcataattactgacacacggtttctgttaaacgcggtccaaatttgccacgaaaagtgcagttaggtacctaaattctggttgaatattcccaatcaaagtctccagcgaactgaaggtggtggctcgcaaaattgacgcgattctcaaattctcaggttgggatttttttcttctttttcattttcctcctttcttttcctttttttcttttccttcttttcttttcctttttttcttttccttcttttcttttcctttttttcttttcctcctgttttttccctttttttcttttcttctttccttttccttcttttcttttcttctttttttccttttccccctttttttctccctcttttcttttcctttttttcttcgccttcttttcttctcctccttttcttttcctttttttcttttcctctttttcttttccttcttttcttttcttctttttttcctttttccctcttttttttctcctttttttcttttccttttttcttctcctttcttccttttcctttttttcttttcttgacccatttttatttatttttacgattacggaacggcaaaatcttgatagcaaaatgtccccggctcatatcataattcaaacgaggagcgctggatatttctacagttcgattcgcctcacagcggacgtactcagccgaaaagagggcatctgccaagtatttaccctctcgagatagcagtagagcaccacacgacagataaaacatcataagcaccactcagtgttgcaaatgtgtttttaacctccgttccgccctctttgtgggcgctgagagatagccgctctccacagcagaaagtttccctgttcgaactcgggacagtggcgaggcgctaatgatcgattatcgattcctcatttgaagctatggtaaagaatcgattattaaggtgttcgttgtcgaataccctgtttttcgatccttttctgtaggtttaaaggacagattaatcgatagatcgcaaagcacaccacgtcaccggatcgattatcgatatttccccatttgaagctgtggtaaagaatcgattattaaggtgttcgttgcgaataccctgtttatcgatccttttctgtaggtttcaatggcagataaatcgatagatagtaaatcacgccacgcatggacaaggatcttctgcactgcgtaggctgaaattctggtttgttgaagtagaatagtgggttgttgtcttcgtgtttgtacatttaaacttgaatgatttttaaactcgaagaatcagaaagtttttttttttttttgctgtttttttttttgtttaaaaaaatgactaggtacctagaatgatgatcgaggatagagaattgagaggggaattttttaagtgcagaacgacgcagctcttgcaatgacgatactttttcttaacgagttttatttattgtaacttccaattcgaggaaacatatacaattgtcgtaagttagaaataatgtatggtaaagcaacgactggttaattgcttattatcataaaattaaagaaactaaacctaagacttaattaagattaaaaggacgttcataaaaatcaaatgggtgagatgagtgaagacctgatgtagtgagaagattgtcttcaaagatgagaaataagttttctttcgaaacttagaaacactcttcggagagtgacacggcagagtatattcggtatccagatgtgtgtttactcccgccactgatacactttaattaatgatcccacgtgaaaaaacatgaattgctgattgaacaattcaattgttaaaaaattgactgcaatgtttcaaatgtacatgttacaatggtagaaagcacattttaccacgcatgtggttaagatagcatttttttttttttttttttttttttttttttttttttttttttttttttttggtaagtgtgtgttgaagtagcattttcttgtttttaaagcagcattttgttgttgttaaactaacattttttttgtcgtaaaatctacattgaaccattgatgtcacttttgtaaactgcaaaattgttcgatcagctatttcattttttccgttcgatccgattcaaacccgtcgcgaaggcgtggagctaccactaaagactcgagttgggttaggttaggtcacgcaactaaattaacttcacggcgatgcgggaggtgtcgcacggaaatgaaggcgcgcggcgcgccactgccaagacgcggggatttcttctgctgctacaattatagcggacggtttcgagtttctctctttttctttttgataaactgtgcactgcggacggcaaataaatgacttagctcgaaaaatgcgaaaccttgatttcgacgttgcaaatttccgttcatgtttcatttctttgaataaagttacagcaattggatacggttacggaatgggaatgtatgagtaaggtattgtttattatagtatcgtcattaagccttgggaggttaggctcaagaatttttccaggggaaaaaaagtccgaatggagattacggaacgctggaaagtagctaagtgtgcgctctttcgactcggagacgacggtgtaaggttcagttacacgatcaaattaagccatcgaactgaagctctgattggtggaaaaatacctgaggtgaggatgcgaccaatgagaggcccaatttgatcgtgtaactggacctttatgcgtgatatttgcggaagacttgctacgttgttctcaggatgagatattctgccaatcgattcgtgaagtatgatcttgcttgtctaatgttttcactgtttggtattcactccggtactcagatttatctaatgtatgtaatcgtacacaagagggttgacttacgtcaatttctacctgaagagtcctctatcgcttagatgcagtggctcccattttttacttctaagtaacgtccttcgttaatttttaaatgggaaaatttcatttttatctatttattataagtacctatttatattatagtaaaggtagtcatttcaagtggtatcacgcaatgatatgacgcaataaaatgttcttgtgcaaagtcccaactcccatgaaaaaattgcaaacatattttgaaaatacctactttctattttcaattttcaaaatctagctccgtttcgtcgaaacgctgatgtcaaatgacctagtgacgtcgtctggcggcatttcccatttaaacaaatgtattttagcagatttgagcacattgccatatctagttcaatgattgctcaatttatgaactaagggtatccctgtttttagttcactcggtagtttccacttgaagacaaaattaattcaatgggtcagttgcgctggtcacggaatcgtgttatgatgccttattcttgcagatcatcttaaaataacaagatctgccaaaacagcaaatttctacgttgaatattgaccgagatatagcggcttaaaaaactcgatttatgacgtcatccaccgcggtggtacatcccatgttgtgcactaccgcggtggatgacgtcaaaaacccgacttttcaaaggacgatatcttggtcaatattcaacgtagaaagttgctgtttgcatggatctccttatttttagctaaactacaagaatcaagcataaaaacacgaatctgttccagcgcaactggcccatttcagacacctgcaacttctccatcagtatccagggtgtctacaaatccggaatttctggaaagtccggaaatagcactgatttcttaagagcggtccggaagttctaaaaaagcacggaaattccgcaagaaggttcggaatttgtttcatttttctgtcgtttttgtcgcaatctgagtaagaaattaaaatgtttgaattttccgaatttcgtcaagtggaggtacctactgaaaaagtactgtatatttctgttgagacggcactgaattccttgggaatgtgcggaaaaattgctgtaaaagtactgatttttggtcagcctgttttagtagacatcttggtaacttttcaaaaaaaaaaaaaaaaaaaaaaaaaaaaaaaaaaaaaaaaacctaacattcattgacttcaagggacccgcgcctgaacccgggcgagaattttgatgaatcgttaggacgtctgcagcgagccaaggcacggcgaaagtgaacggagggagcatgagccgtgaaaaattatgaaaaatgacaattagacagcaataactacgcgtttccatgtcacgcttaacgtgtccgatagtgagtcgtcgagcctcgccgtgggaagatggataggcgcccggcgcggcggtgggttaagagcgtttacagagcgatcgcggataagacgctcatttttcacgcgtcccgctgccccgttccgccctgttaagcccaagtagcgtaactccgattactctcggtacagggtgttctaagtctattacgaaaaacgtacctagccacttagtatttttactctgttaaggtgattcgatggacgccatattttatgtcagaacggcatgcgatatatcgcatcaattggttccattttttcagctactcgtcatttttctccaattttgagagcgcgattctgttgtcaggagactaaagcactcacttaccaattttaacaaagaaattcaacgtaataagggcgtggtttatttagagagaaaatatcgcattcgagtgcagtttcgatatcagtatcgaatgcgatgttttctctctgaaaaaaccacgccttcattacgttgaatttctttgttgaaattggtaagtgagtgctttagtctcctgacaacagaattgcgatctcaaaattggagaaaaatgacgagtagctgaaaaaatggaaccaattgatgcgatgtacctatcgcatgccgttctgacacaaaatatggcgtccatcgaatcaccttaatagcgtctttaacaagacgaactcgctgtgcaaagatagcgagcaaagacattatgcagggtcgccgtgtttttagttttggagtccccaaacaaaatggcaaccctgctgatatccgagttgaaacatagaaagaatgcatcggataggacaccgatggaaaagagcagggctggaggtcgcatcggagttattgcccgtggaatttcaccgacaaccgaactcggtgcatcatcactacttacattggttcgctccacttgcaatgtgctgaaagttgagcctccngggggggggggggggggctttagtgatgcgcaaggtaataaagcgttgaagacactgctaagaatcacaaccaaatcttaattctccaaaagtttatttcgtgaaagggctcgagtttttgtcgggtgcagaaaatctcatcgctaaacctcctctaaagtctgaagtacatacattttgcaacgccgcgattcaacgcaaattctgccgctagtttcttttcttgtgaaggctttgtcataaaagaaggcatgcaatgtgacttgaacacaacctttcgactgagtttttagtgctgtaaacttcagagtcattaaatcaagttaattttttttgcgctttttttttctctctacgtgtatttgtctaatcctagcgattaaaataaactgaagtgcgcgtaagtcgaggctggccatcaaggaaaaggcaaatcaaaagtgcatcagggaaaacgtagaggagtctcccacttttttcccgcctgcagttgaaaccgttttgacaataacctcagtgaatcagtaatgatggctgccaaaatcggtttctccttcaaatccaaggttatgcaatgtgggccacgggggagttgaaatagttgtatcacgcgccttatgctcgtaccgtttgttcgcgagaaactcggtgagttttctgttcagattgtgcatcacgcaaaaccaaaaaaatttctcgacagggtggcaagtcaaattctgttgcaaaattccctgacgtttccctgacttaccgatagaattccctgacttatggtaatcgtcgctagccattaaatcaaatccatttttctttttcacggaaaacagtatttgtttgctgcatggttttattgtttcgaaaaggtgaatttcgctgaatccacggtaacaagcagaattggacggaaatgaccgatcttcaccgtcgcggaattatcgcggctatcgctcaacacgtttatgcaattattgttcatacgcgaaacttccctgaccgtgcacgaaactccctcgggatttttttggagccaaattgactttttgcctgtatattacggcgcattgagtgaaaacttggacgcaagatgttttcgtaacagaactagtaagtagctataacttggggaagacaaaagcgcactaagaatgaaatcgtgaagaatagaaaaagcaagctttccttgtagtgctgaaaattctgagttttttcaactcaaatagatttgtttttctttctttatgtgacttcctgtgaaaattcagatttttaggggccacgttggcgcagagtcttctttttttaggcgccatggccgattttttaggcgcatttggcgcgttggcgcctttgagtttcgaacactgatcgcaaagtatgccacgccactgctttttttctcgttcgaaggaaacccgtgaccccacgatgacgtcgagccgtgggcgcctgccctccctcctcctcccccggttccctgtgacgtggggttatttgtgcattggaaaggcgtgccgatgcgagcgcgactcggccgcaaccattcgattgtcgaatcgttatcgaatgaactcgatcgatagatccctctcttcgcaatgttttttatcgatctaggttattcgatcaatcgattataacgactaatcgacccgcagctctgccacaggctccgatttcgagcgcggaatatgaatatgcctctctggaggcagaaaatcaatcaatgtgcggcttccttcgcttcctctgccccccccccccccccccccccccccntcgtcaaatgctaatcataattatttacccccgcaacaacggtgagtaagcggctctcgccgtgggttcgctcctgcctttggtaaaaggccgtgtgcctttgtatggcatggtgtctagaatcgagattcgtcgaggaatgaaacattttaaggaaaatcaagaaaaattaggaaatctgctctagaagctgggtatctcttctaccgatttgatgagggttgatacagtcagggaataccgcactggaaaaaaaaacacattggatctagaggcgagacttttaaaaatattgacaagaaaaaatactcttgattcaatcagatttaagcttaaatctaaaggaaatccgctcaaattaagaggcttggttcttgatttaagcttaaatctgattgaatcaagagtattttttcttgtcgatgttttcaagagtctgaactctagatccaatgtgtttttttctccagtgcgggaaaacggggaaatgtctgggaattttaaaaagtcgaaggaaaacctagaaatgtcagggaaaatgatgaaagtgtcagggaaaaattgtttattcgcattgatttcctctttagaatgaatttggcgttctgagcaacacattttgcctgagaattattttaaattaggtgtaggtaattaatcatttggcgtttcttcaactgtctaagaattttacttaaatgtgtcagggaaatttcaggaaatttcattttctaaattttgtgacaacactgtactccgccagaagttccgaattgttccgtttcatgcttcgcaagtttttgaagtgcatgattttcctgtcgaagaggcaccgaattttttggtaaagcaccgcaagagtgcctactgatttttggccagccagttttagcggacaccctgaaattgttgtcgtggttttcttttctttttttcaagttcttgacttgtctcgacgccctcgaatttctccaatctttgcaaccttatcatcggtgcctgaagacatcgaattcaaagataaacgcacacctgctgggaactgaacgttgcgtgacgtcaattttcaatttactcgaaacgatactacgtcgcttcggccagccatttttagaagacaccctgatcagggtgtctacaagtccggaaaaagtactgatttttctcagggcggtccgggagtattgatataggcggaattccgcaagatagtctggaatttttcattttttcgtcaattttgtcgcaatttgagcgggaaattcaattttttaaatttgccgaatttcgtcaattggatgtactgaaaaactactgactttttctgttgatgaggtactgaatttcttgggaatgcactgaaaaagtactgtataagtactgatttttggccagcctgtttttgtagacaccttgctgatgttgttgtcgcagttttctttacgtttttttaaagctcttgaattttcccgatgtccttagggttcctcaactcttgcaaccttatcatcggagcccaaagtcatcaaattcaaggacgaaggcacacctgttgggaaccgaacgttgcgtgacgtcaattttcaatttactcgaaacgatactacgtcgcttcggccagccatttttagaagacacacccggaggttgttgtcgtagttttctttactttttttaaagctcttgaatttttccgatgtccttagggtttctcaactcttgcaaccttatcatcggagcccaaaggcatcaaattcaaggatgaaggcacacctgttgggaactgaacgttgcgtgacgtcatttttcaattttcccgatttccttaggggttcctcaactcttgcaaccttatcatcggagcccaaagtcaacaaattcaaggatgaaggcacacctgttgggaactgaacgttgcatgatgtcatttttcaattttcccgatttccttaggattcctcaacccttgcaaccttatcatcggagcctaaagtcatcaaattcaaggatgaaggcacacctgttgggaactgaactttacgtgacgtcatttttcagtttactcgataggatgttgcaggtcccgagcggaccggtgagatccggctgctgtccggtggccgttggccctaaaacccgcgctctccatcgcccttgcgtcgtcggtcgtcgccttgcgttgcgtcgtgtcgccgcggcgccgttcgtcggagcgacggattcacagatctagcgtcgcgtcgcgttgccgcgcaccgtgatcatttgaacatgaataaattagatgaagcggccacttagccatcttcctcttttttatccgtctcaccctcccccctccccgcggaggcaccgttaatgtgtcgatgtcgcgtcgtcccacactgttgcatgcccggctcactagactcttctagagtccctttatactgagagtcaagacaacaccccctcatggagtcacaaacgggaataaagattacagaaattgaacgctttttgtaatctttgatcggcccattctcaaattcctttctccgttccttctctcattccgtctgttccttgccgaacccgtaattccctggtgtattccagattataatctttacaatcggtgaaaatgtaatctgtattcccgtttgtgacactgcgaaggcctaaaatacgggaaccaatcagaaatggattcacactgtcctcactctcagtataaagggactctagtcttgggcatttctaactgaaaatctatctgattttccctcagaagtcatgcaaaaatcagagcagttgtagatgaaaattgcaccggtacagttttgtagaaataattaattttttaatcaatttgacaaccttgaaatggagttacgttccttcgtccgggagacgatgacgtgtgctctgtggttttaaggggcgcttgcggattttttttgccctttctttcgtgccactatccccctggggggaggggaaggtcacaatggaaaggtgacactgaagtgttaatactacgctccgttttgcacgccccaatcgatgaataacgacgtgagaccaactctgccgtgctcaggaagaacgccgtatgaacattcgagagttgccaaatttcctgcgataaattgtttatttttgaggcaagttatgaatattttttcttggaattttcaggaactttagatggaattgcaaagaaaattatgcgcaaaattgcggaagaaaaacattaatatgtttaccaggaacttcgtgttttatcaaaggatatttggcaacgcctgaaggttcatacggcgtttttcctcagcacggcagaactggtttcgatcgaatgtacgcggggcttaccgatgagccacgctcgcgtgaaaagagagaaatatgcgtaaatgatagtgaagaggggacgaaataattgatgggggagtagggggaattgattgaaaaggaaatgacgccctttcacaaagtcccccttttttttcacccaacaatacggtggtaacctactttcaaagtgctctcgttctttttctttcctatcacactggcgtcctatacggaatgaaggtgtcgtaaagttttcacagtgtctacaagtccggaatttccgaaaagtcccgaaaaagtactgattttttcagggcggtccggaagtactgataaaaagcggaatcccgcaagtaggtccggaattttttcatatttcgtcatttttgtcgcaatttaagtgagagattcaaatttttggaattccgtcaaatgaaggaactgaaaaaatcctgaattttcctgttgatgaggtactgactttcctgggaatgcactgaaaaagtactgtaaaggtactgatttttggcgagcctgtttttgtagacgccctgtttttttccggagaatgaacttttagagtgttcaaaattgttcagttgcgctggtcactgaatcgtgttttgatgcttgattcttgtagattaactgaaaataataagatccgttcacagcatcttactacgttcaatattaaccgacttattacactcggaaaaattcattggaaaaaaacacatggaatctagagtccagactcttaacaacatcgacaaggaaaaatactcatgattcaatcagatttaacttaagcttaaatcaagaaccaagcctcttaatttgagcggatttacttttgatttaagcttaaatctgattgaatcaggagtcttttttcttatcaatgttttcaagagtctggactctagatccaatgtgttttttttttttttccagtacttattcagtttatgacgtcatctaccgtcgtagtgacacccttggtttcttccatcttccttcgtgcaccccagctttcccactcgtctatagttctgttcagcagaaatatgtccatttgagcggatcagagagaccaataaatggtcgctgaaatcaaaacggcgagcgtccaacttttttacgaccggacgacggcgagacgcgggagaaacgaagagaggattccgtggggttcgaattcctggctacctacagaatttgatgacgctacttgttacgctgatgggccatgaacgatccaggaatgcattccataaatgacagactgaatatctttctctgcgaaccatgtccgattcaaaattcacttgaggtccctcgttgcgttgaccagcgggcattgaaattcactcgctgcgcattcgccacacagttaaaaattacagtttttgatgttccttcgtgttactttttgtggcgggtcaaactaaaggattcgattgctcaacacaataaattttgtgttaattcgacccaaaccgtgggctacactgagacatgggatcatgaaaaaagtgtcctgccgaacagtgttcgaaactcaccttagagttttaggatcgctctacacttactatgtcttctttgtctatcgctttgtctatcagtttcaataatcagcccgctggaggctgacaactaattttcaaaaatgtcgcagattttcaacacaaagatttggtcaattggacacagggaaaggacacaaaaactcaaccaacagcttatgttacttcatgttttactggtacacagactttatgtccactttttttacgtccacagacttttcgtccacaatttttacgtccacagttctaaagcccacactattgttaagtccattacttaaacgtccactaagttaagtccacaaatgtaaagtccactaaaatcaaattcaagcgtcatattttagtccgtgtgtaaaattatatcgaaatgagacaattaagagcgaatgagttgttgttatcgtaactcatattttaaatgaaatgttaatttcttcttttgattcatcttttcaaattgtctttggtaaatacttggtttcatttctatccttgaaatttccgatataaaatatgccttcaatgtacattcttttttttttaatgaaattgattacttcattttaaaaacatttacatttttaaaacgtggtaaatatttgtaaaaccttttccaagcaatcgcatcaatatgaatctcaatgagccgtagttgtgatgaaagaaactatacaaaaatgaataaaagatgaaaaaaactaagaagcacgcaattttttgtttttaacttatttgtacatcgacctccttgagtcaaatacgtccaattttgagcgtttagttgcgcttacaccacgctgcagcacagtgaaagcccagaacataaaagaataaatttgattgctttggaaatcattaaatttgacacggaaccactattatatttacaaaaaacacatgatattttccagtagtacatatttctttttcatcagtttaaaagggaataatcaatgcagagagtgcaaacatttcaaaatcatgagttgaaaaacgctgactccgcgagtttaaatattagagcctaacacagagcggagcggcgtgttagcagcgcagaacgcgcactggcgcctacaaacctaacgggatacttcacgcattacgcaacgcgtgaagtatcccgttaggtttgtaggcgcttatgcgcgtgtcatcacgctggtcgcctgccgcgccgcaacgccttaagcaactatttcgcgtcagaggcgttgcacagtctcctacaagattgaaggcgcacgaaatataactagttaaagaggactttcaattttgacagcatctgttactgaaaaatgtttaatttggcattggagcgtttcctaggcttccgctttggttttcatcttatcatatccgtacagtgtacacatgaacaatgaacatataatagcctgagacgctgaatgtcttaaaattataataactaactaactgtttttatctgctcttagagtccgttctctttcatgacttgaatcatgtttgaaatgtttttaagaatgaaggtagtagtagtatgcattcgtttttgaggtggttcctgtcatttaaatgagaagaaaaaaatgtggatttaacatgtccaacaatttggacaattttggacatattcatggttggacattaaatcatgtggacttaatagagactggacttaacgcttagtggacacaaatagcggtggacatttatttaatggacgaaaagtaggtggacataaagtcctggaagcgttttacttcgtatatcaacacaatggtgttcactgtttcttattgtgtatgtagcctgcgaatacgaagtgagtgcaaatttccgctgcctgcgggaaagttgcgatttttgaactgcgtatttctcggtttttgcgttactttttcgcgtttttcatgtgcggatcgtgttctacgcgtcatttacttgaaggcttgtgcattcgaaagtcaaaattcgttcatggactagtgacccattgtcgcgtttgtcgcgtggaacaagttgcgtagaaacttggtcgaaccggctcttgctcacgaaccggaggagaggagccctgaattattcgtcgtttctcacgaaagaacgcaactatattctcaatgttgccagattttctcgcgcaaattgcatttttaccatgagaatttcgagaatctctagctgaaaatttcaccaatttttcctccgatcccatgcggaaatcagacaaattttcggagaaaactgtgcaggtttattctcgtaaaaaatgtaactatttgagtcaattttgcaactttagaatggagtcacgttatccttcgcgcgggaatcgaggaacagtagcgaggcgtgaatgatcgattatcgatatctcctcattcgaagctgtggtaaagaatcgattattaagacgttcgttgcgaacaccctgttttcgatcctttctcataggtttaaacggcagatgaatcgatttatcgcaaagtgcgccacgccactgttcgatcctttatcataggtttaaacggcagataaattgagtatcgcaaagagtgccacgccactgttcgatcccttctcataggtttaaacggcagatgaatcgatttatcgcaaagcacgccactccacgtcactggcgaggaattgccctaattggtagttaaattctttcagtggtccatcaagtaaatcacatcaagcccccagcgccagccggtggagtgcgattcgggtttgaggagtcgttttggggcaaaaaatacgagtgagcctcgcggaggaactggtttcgacttaaaatccgcgaggcggtaacaatcgaatttcgatatttccccatttgaagccgcggtacagaatcgattattaagatgttcgactgcgagacgtgatgatcgattttcgatttttccccatttgaagccgtggtgaagaatcgaatatcaaggtgttcgttgggaacatcctgtttatcgatccttttccttagatttaaatggcagatcgatagatatatcgcaaaagcctcctcacttttatcaagattttgaaacttgcgtgcgctcaagtgtcttgcgcgggcgtctgattttgtaacagtactgttgcagttccacagttgtcaagtttctatgtcatttcgtcgtttctcggatcgaagaacgtaactccattccaaggttgcaaaattgactcgaacaattcaattttttacaagaatgcacctgtgcaatttttatccacaatagagaatttgcaggtgtctgaaattggatgcatttcgtgtttaagtagaaactactgagtggcctgaacacgaggatacctttggttcatgaattgaacaattattggagaagatatgacaaaatgcagtttctcacttttaaatctattctttaactgtttcccatatcagaaaaaattatacaaaattctgtgaaatcagctatgtaaccacttttaaatgcagcagttaaaaaattgcatgcaaattctgcattgttttcaaatttcgtatggaatcggagaaaaattggttaaaaaaaatcacaagttagcaacactattttctcattccccctgcacttttgcactttttgcagaaacccgatacttttcttccaaaatgcaaacatatctttaaaaaaatgcaaatttttagcgcattttagcgttttggagccatccatcccttcctgtcatcggatcgtgtcgaactttcagtatgttgttgaggtatagtataactcaagagattcccgtagaaatctctttgttgcaattgattccgggtcgaatgctactttgacctgacaattgttttacatgcatttaaaactaacgaaacgcaattggcgagaatcagatgttgagctttgatcagtcctcttgggtggtcgcgcagcgcaactcacaactggttccgttcgatagcggtgcgatcgcaagggagataaaacggtgaagttgaacgaagggagaggaagagaggagaacagagaaaaagagaggagaggagaagaaggtgggagagagggagccgtaggctttaagccggacacgtcatggctagcatatccgctgaaaaatttatccgaatttggtgcaggcggccgtttggtcgcgtggtggttgaccagccacggcgcacactggatcgagtcgatcagagaggttggacacgaaatttttaaaactaaaactgcaagttttgatgtttaattcgtcgaattttaaatttgaaggggtgtcgctccaagaaaatttcacgaggaaaccgatggaaccgcttttaaagcttcaaagtttctttacaaacgtaattagaactgggaaaagaaaagaagagacagatgtcacatccaaaattgcacgattcaacagatatttacatgctaaccaaagggccaactgatgattgatgcatccggacggatgtgacttttgtctcttcttttctttccccagttctataacacggaaaaagaagaattgctgattcagcaattcaattgctaaaaacagtgagtgcaatgtttcaacgcagattttacaacaaaaaaatgctactttaaccacccccgcggttaaattagtttacaatatggttaaagtagcatttttttgttgtaaaatctgcgttgaaacattgcactcactgtttttagcaattgaattgctgaatcaacaattcttttttttcccgtgaaccttttaaagtttccaaattttgtccgacctctctcatcgactcgatccactgtgcggcgcaagcatctgtccctaatttggctttatcttaatcaaaatgaactatatacatcctgacatgagctctgagatccatgatatcacatgcatgacagggctcatggcacaatcgatatagatcctttggatttgaacagttgcgatttatcgattgatctgccttttaaagcagtggaaaaggatcgataagcaggatgttggcagcgaatacctcaacagttggttctttaccatatctccaaatggagaaatatctataaaatttgattctttacctaatttttttgataactgaggcaaatttaatcgctgtcttctaattggaccttatctgctggatgtcaataagtagtaattcataatgcttgacgtaggtttacccaacttcggtaataaatatttagtgcgaaaaatacatgctttttcctcggtgaggttggcgcgatgattttcaaaacgagttccaaaggaaaattcctcagagcagcgctttgatttcccgaactaaattggaaatcccagagttgaaaatgggaattccgttgaatgatcattataatttactgcttaaaagggggggggagagagagagaaagattttgttcgaaacaatttttctctcttaaggtatagtttttttttttttttttttttttttttttttttttttttttatgcgtgttcatttttctgatgctaaaacgatgaggaaatataggaggaaaataattatttgagcaatttttctttcgtagcagagtttttccttttctatttttatattaatttctcctgatagcatttcaacattttttatcttcccagctcactccaaagataaaataccctcctctcgactgtctaatttcattggcagtttaaaataaaaagattagagacacagtacatggtcggacgacaaaacttagataagagcggaaatgagaacatgtcggaaatatgagtcagtctctgaaaacctatctttcactgacagtggcaacgtagacgaacagcgaattacaggacgtctgaaaagagagatccagtaggatcacgatattttgtagccaggctcttgcctatgactcgagaaaaaatttcaaaattcatacaatttaatgtgtgatgatgaatgtccccattctgaacttaagcgtaaaaatccaaatggacgccaatattcaaaaattgtctttatcttttttcttaaaacttaaggagatttggtggatgccatattttgtgtcagaacggtagcattgttagcgtcagaattgttaagctctcaggatcaaaatttcgaattttttttctccttgaattttcaaaaattaaggaaattattctcttagaagacaaggtcccttttcatgaagccggttactatagctggaatgaaaattggataagggtcataggtaccaacactgatcgtgaggtaataaattcttacccaagtttaggtacacctaaactgagcaatttcttccgcaaatatgtctacgacttattattcgctggaactttcgctaacttaacccgatgccgcaattccactaagtatgtttcaacccgattctcgtttaagtgacgtatgacgtcatcatgtctcggaaatgactcctcgacttgtctattgtcaaaatgtcaacagtcgagctatttgtcaacatgcgatgaaaatacacccaacggaagtgtcttgcaatgtaaataaggatcgactgcatagccgcagggtactgtgtgacgtaacaccgaacgaatagctggagattcctctgtaaacaccagtaatgccccgttgccccatgtcatctatctctgaaccgatcgtttgtatgtgctcagaggctatgtacaattcggtggtttaacttcaaagttgtcttgttcgaactatgtttcgaattttttgcgtagactttttttctttttttcggtacctacaagacaatattaggacttgatatttaggacccaaaactccctctaaaaaatgaattagtatgacgcttttaaacgttcttcaacgaacaaatgcgcgcaagggtagcaaaacacgccttcaatgtcctacatgcatacacaacaaggatacccaaagaactcaatgttactaccaaaattctgaaactcttcacttctcttaatttaaatttttttttcgtatatactcccattttcaaaattctctgtaaagacgttaatatagcctgtgacgctgaatgtcttgaaatatactaactacctaactatagttgcatatgataagcggtggcgttttgaaaggcggaaacgccttctatttttcagatattgcatggagcacgaatagttgcgcatgcaggggttggcttgaaacatttccgcgtataatttgtcctctcagaagtaatagtttttctgccttcatcacggcttcgaatttgagagctttttttgagttttggatttttttttatagaaaaccagtgataccgccgtgtttttcgcaaaattttacgcaggatgaagcacttcaatcgcaaatggagaatatgcaggtgtctaaaatttgaagaatttcatgttgaagtggaaactactatgtgaaccgaacacgaggataccgttggttcattaatccagcaattattaaaggagatgtgacaaaaatatctaatttgctaaaagtcgtgtgatttaatggggaatgccgcctgatgacatcacgaggcggtgcattttctcacttttaaatcaatttttaggctatttccctgtatagaaaacaaattatataaaatactgcgaagtcagctctttaagcactctcagatgaagcaataaaaatgtgcgtgtactttctccattcctgtcatatgcaagagcttcattctttcctccaggaacaaatctcttttctatgtattactttttagttcatggtgcttgcattcaatagaaaaacttacgtgatgcatgagttttcattccaggctttttcctttcgtgacttcatattgcaattgactcggcactcagcgcttgagcacttgcatgtaagtaatgactataggttgtgcatattttctagccttttcattttcattccaatgccctacacccactctccttcggaagtgccaatttggtcttactgttacgtcatgttatcgaaatagaatctatagttgtcaggaagagccgaatttggtgtattttaggtgtattttaggtgtatttttaggtgtattatacacgaatgatatgacgaaccccctgtttatcgatcctttttcatagggttaaatggtaaatcaatcgaaaaatcgcaaagtacaccgcgctactgacttttattacactttttcgacacactggtttttttttaaaacagattttttttcgtcattagaaagccattcaattcactaactgccttctcgtatttccacatttcgtatttattttctgcgtttactgttcttctccttactgtccagagtttttacttcatttgtttgcgacccttttctctcaactttttttttttccatcaaattttccgtttaatgacagctttgtcatcattacgtccttacctactttaaagttcgttgagtaaccagaaaattcaagtcgctctaaaagcctcctagtttcacaataaatccgtcacattcccgggaacccctaaaagctctcaacaaaaatcccgaatgctttacaatatttttgactccttgaaaaatctcaacttcttttccttaccagtatatgatatttcatcttttcgacaggaattaattacattttgcaattaggaactacaaattttggcgttgtttagaaacaacgtatgtaccattaatttccctattcgcataagtgtttttatggatgggccagaaattgtagctcccaatcaatggcaaaacgtagtctaattataacaaaagcatgaagttttcacacttgaaccttttatttaccgtgcgtcaacctaaacgtgacattttgaacgcagtgcgctttttatcggaaagtaaacggagtggttgtaatgaggttgacttgtgtattgatttctgtggtcgaaaaggccaaaattaattgtctggaaaggttaatcgtttccacaactacgacgaggctttgaatccagaacgtgtgtgtcctttttatcgatttatcactgattctacgccgcaccaatgtttctttctcttccgacaatctctcttttccaggcctaacatatcttcaattatgaggtttaatcatcaagaaaatgatgaaaacagacgaacactaatgtaattttcgtatctgtctgtttcaggtgagtttttggagatttatctttctctgccttcaaaccctcggacgtggtaagtctgtcctctttcctagaactccactgtcgtgatagcgtggaaagcagtaagtgcaaaaatgaaattttgagaaaacaggctgagaagcttctgaccggaaaattgtattaaaagaagcctccgttctttttcaaattgccactaatcgtccgaaagactcatatagaaattgttcagatgattaaacatcgactgattttatttcaattacataaggagggttttttttttcattttcatgccaggctattgtaaggcaggacagccgtaagtgctattttctgcgtgttttcatggttgcgttttggacacacaacaaccacgttttcaggttagaaattgggcagaagcgggcggctttttactgggaagcactgttttcattggctctctgcaggaatactgtcacttgctgctgtcttgcctgaaactacgccatttttagcgcacttacggctctctcaaatgtctttactcttggtatgaagggactctaagagcaaccagggaaatgtcagggaatttaattttccaaaattttgtggcaaccctgttgaaatgagtgcatgagtgcacgagtgtatctttctcctccgttgcatctggttgcacgcacgtcccgacccactttgcatttttcaatcattatctcacctgcgacgtcctcgcgtttttattggttttatcggcgaatataagtgcgggcgccgggcgcttgtactaaggaagaacgctgtatgagccttcaggaggttgccatatttccttcaatcactcatgaatttacggggatagttctgaacatttttcttccagtttttcagacaatgtaggtgttgcatgtgtgaggaatttgtgatttgactattgattcttacgtagaagttcgcgagaaacacgatggtgtcactggttttctctgaaatcccaaggtcaaaaaaagctcttaagttgagcgcaaaatggagggaatatctcacgctatcctgggattccgcctttacatcaagaccaacactccatgcaaaaatagggagcaaatacattagcagtgttgccgtgttttcagttttggagtcctcaaataaagtgggtgccctgtcaatgtatttgctccctatttttgcatggagagtttgtttagaagtagaggtggactctcaggatagcgtgggatatcccctctattttggcctcaacttgagagctatttttgagcttgggagttaatttcagagcaaaccagtggccacatcgtgtttaccgcgaacttttacatcagaatcaactgtcaaatcgcaaatttctcacatatgcaacatctccattaaatttaaaatatcggaaaatttcaagtaaggaaaaatgcgcataactttcttaaaaaaatacatattttatgcggggaaattcggcaactctcgaatgttcatacggcgttcttcctcagtatgccagtgcggaaccggccttcttccgtctcgggccgcggtctcgatcagtggcgcggcgtgctttgcgatacatcgattgatctgtcatttaaacctatgcacggagaaaaaaaactcgtgcgtgggacccgaagtttaggtcatatggatctctgaagttttcagattgagcatctgaacactttaggtctagctgccgaagttcggatcatacatctgaaacttcagttctcacatctgaagtacttcggatgtgagaaccgaagtacttcggatgtgagaaccgaagtacttcggatgtgagaaccgaagtacttcagatgtaagaactgaagtttcagatgtgtgatccgaacttcggcagctagacctaaagtgttcaggtgctcaatctgaaaacttcagagatccatatgacctaaacttcgggtcccacgcacgagttttttttctccgtgtggaaagtaatcgatgaacagggtgtttgtaacgaacacgttaataatcgattctttaccatagcttctaatggagaaatatcgataatcggtcactgggaaggacgcggattggggcggggggcgcgtgaactggaaacgggtacgtactattgcgagcggtgacggtgacgcgcattgtcgaagacgattgtcaacgtgacatcgtgtcaatgtgtcaatgtgacatgacgctcgccctcgaacctgtcgaaagtgagagtgggcagcaacgcaacgttgccgcctcactcgactcccggtgaagctccacgaggagagctttcttcagtcaggatcgtggaagctagagaacctcgtattcagaaatgtctcggtaattttgagggtgtcttactctagaccaataggtcccgggttcgaatcccggtggtggcgacaaattttcatggaactgacgagtggatctgcagaaacagattccactcggccttaatccctgaaaatttggaagcctggagcatggatgtgcttaaatcccatgatgtctaaggacaataaatactgtctatcgatggctgtaggttccaacggaatataagccactaaaccagcaaaaaaaaaaaaaaaaaatttgaggttacgtcttgtagtttctgaggcctaaaagggcagccagcctataaattcaatagggtttccacagtcagggaataccgggaaacccaggaaatatcagggaattttaaaaagtcagggagaacctggaaatatctaggagaatgtcggaaatgtcagggaaaaattgtccaatttggttgactggacaatttttccctataggttattatatatttcccaatatttccctattttttacaataggagggaaataaaggtctcctagaataggtttgacatttcaaacaacaaatttttcctgcgaactatttcaaaacatgttcttctcagcatctggcatatctttcattgtcagggaattttaccgcaacgtgacagagaaatcagggaaatttcagagaattacatctcctaaattttgtggcaaccctggctccatattttagcgcgtcggtactctccctgaataggtactttagtggaagcgagggacgttctttcaagtaaatttcagggggtgaaagttgttcaggggaaacgttgctcggggtcggaaccctcgtgaaccccgagaaatgcccataaaattacagagatcgtcaagaaagggacaatgggaggagtgctaagttgttcaaaagtcagagaaaatctaagaaagtcggtgcatttgacccagctccgaaaatccgaaaaatcagggttgcctcagtcagggaaaaccgggaattgtcagggaattttaaaaagtcggggaaaacaaggaaatgtcagggaaaatgacgaaaatatcagggaaaatttgttgaatcaccttcatttgctttctcaaatgggtttgaggtttcgaacaagaagttttgcctgaaaaccattttcaattatgccttattcctaaccatccgtcacttcgtcaattgtcagggaatttcaccataatgtgtcagggaaagcaggaaaatgtcagggaatttcattctctaaattctgtggcaaccctgagtttttttacctcttgacttctgtttcccaaaagccgccgcgaattctaaaattaattttaaacacaaccagtggcatcttcgtgctctttgcattttgcacaaacgtatgagacaaaaaaaaattcccctgcaaccatctaccctccagcatatctttggaagcgccatggccaaaaaatgtgtacacaagtgatgctcggttatactcgagtatctttacattgggcggcaaacagctgtgtcgtgcggcctgctttgcgatatcgattgctgccatttaaccccacgtaaaatgatcgataaacatggtgtccgtaccaaacacctcaataatcgattttttaccatatctttttatggggaaatatcgataatcgatcactcacgcttcgctcctggcaaacagcagaaatcatgcgtccggttccgtgttgaagaggatttgtcatgtgccgtgctaagaaagaacaccttatgaacattcgaatgatgccaaattgctcccactaaaatatcaatttttaaaacagtgtatgattatctctcttttaaaatttttacatacgtttcattcaattccaaagaaaattctctgccaaaatcgaaggaaagaattttgaagtttccccgaaaatgcgtgttctatccggtgatatttggcagcgtttgaatattgatacggcattcttccttagcaaggcagttatgtgctctgccgaaaaaacaaaggtaccgcttgtttaaagcttttgttccgccagcatgggagtgccgattccttcctattctgacatgatggagtgtcgctcgtcgcctcataggcggcggcgggaagagaatatttattcaggatttttgtggtgggttcggcgtgtaggatgtctaaagtatgatttctaggacctaaataaatcagaagttaccgacagggttaccacagtcagggaataccaggaaatgtcagggaaaaccgggaaatgtcagggaaaatgacgaaactgccgaaaatgtccgggaaaattgtttaactcttctttatttgctttctgaaatgggtttaaggtttcgaactacaaactgtgcctgaaaactattttcaattgtgtcttcttaaccatttgccatatcttcaatcgtcagggaatttcaccaaaatgtgtctgggaaatttcaggggatttcattttccaaattctgtggcaaccctgtaccgagatttgccttctagcgaaaaactcgcaaatttctcgggtaatttgtgttgagaaccaatgatttctcctctacccgacctaatctgagatttcggctgtctggaaaaccgggaaaatcagggactttgcgacgactgggaaaagtcagggaattcgtgggaaaattcagagaatttctgacacttttagtaactactaaaatatattactgatcttcgaactgtttactctttctggtcatttttaaggcttgtcatcttgtaacaatctactggacgttttccataatttgatctctaaacaaggacattttgtcccaagtttcgcgaagctgtacttgtcgtattacctagtttcaggctacctattagccggatccaaaaatcttcactttatcatctggactacattttgcattggtatgaggagtgtagccaagtgccagaaataatgtaacattttctttaaaacaacttacattttattaataaactttgaccgaagcttttcgaagcaagcgcctcatcgtcagggtcacaaagtataaatcacacaggccataatctaatttcagacaaggtaacagaaagaagcatttctaccaggagaatattggacatttttgaccgacaattttactgatgtttcatcggatctcatttaaaaatcaggaaaatgttgcactaaaaaaaaaacttgggccgtggaagccgtactcacaggttatacagacatactgtccgcgttccgggctcagaggccgaaagttacaggcgtggtggtacccggagcaacctatgttactgctccagcacccggaactttcggcggcctctgagcccggagcggacggtatgtctattgaccctgtcaacactgtctcatattttttactcctaaattccaaatttttacataatttcagactagtcatttgggatggccgtacatttttcactttttcattcctatcatccagccatcacctataaaattaatgactagacttgcaactgatagctccactgattaaagccagccaatcgcgtaaagacttgaagtctcaccacccgtgacgtcatcaagtctataaaagcgtgagctgcccaatattcttcagcgtgtctataagtccggaaagtccgaaaatagtgctgattttttaagagcggtccggaagtactgagaaagtgcggaagttccgcaaggaagtccggaatttctttcatttcttgtcatttttgtcataatgtgagcgagaaattcaaattttttaaatttttcaaattttgtcaatgatcgaggtactgaaaaagtactgcatttttctgttaagaaggtacggatttcttggaattgtactgaaaaagaactgtaacagtgctgatttttggtcagcctgtttcagtagacacctcgttcttggtccattccatccctgacccatatataggtacatacgttacgcccactcatagtgtgactctcttataattcaattttgtctaaatttacaatacaccaaacttttcggtctctcaaaatttttctattttctctcgctctcccacactcaagtcttcactttgacagacccgtatctttattttcaatttagattgtggacaaaaattgcacgcagtacctcctcgtaaaaatgttaattgtttgagtcgatttggcaacctcgggatggagttaggctccttggtccggaaacgaggatattaagacggttaattactcgcacgagcggttggaaatggaagatgcaacggatgatgtgcgagccgaacggatctcatcaagcgtcggaaaattgccggaggaagtaaaattaacatcctagaggctcgagcttaagtcggcggatgaaaccctggctcgggcgagttccgaactgtaaagtcgctctttacggccgtcgaaatcccccgcgccgcgagtcgaatgggatttttattgcggccaataatacaacttcattgtttattgtttgcttcttcgacgcttccataggctacgcgctcccgttctgcctgcttaggaaaaacgccgtatgagccatcagaccttgccatgtttccttcgatacaaatacgaatttactggacaaatggagttgttgcatgtgtgaggaatttgcgatttggctgtcgattcttacgtaaaagttcgcgagaaacacgatggtgccactggttttctatgaaatcaactcccaagctcaaaaaaagctctcaagttgaggccaaaattgagggggtatcccacgctatcctgagagtccacctctacatcaaaacaaactctccatgcaaagatagaaagcaaatacattagcagggttgccgtgtttccagttttggagtccccaaataaagtggcagccctgtcaatgtatttgctttctatctttgcatggagagtttgttttgatgtagaggtggactctcaggatagcgtgggataccccctccattttggcctcaacttgagagctttttttgaagttgggagatgatttcagagaaaaccagtggcaccatcgtgtttctcgcgaactgttacataagaattaatgatcaactcgcaaatccctcacacatgcaacatctccattgcgaatatcctttttaaaatttttcagacaattttgtacgcaatttaacactggaaaaaaaatttactggctgtacagacttgacgtccgttccggcctccgaggccgagagtaccggttgctggagccgcacagggttcccgtggtcagggagcaacgggaaaaacaggaaatgtcagggaaaacctgtgaatgtcagggaaaatgacgtaaatgtcatagaaaattgttgggtcacctttatttgtcgtcaagaaggagttcgacgttccgaacaacacattttggccgagaactatttctaatataaaatcataataaactaatacatcttcaatttgtataaaaacaagacatatgagaaagtcgtcagtgtgcaaaaaatgacgtggtttcaggcgaaacaggagtaagagacattattcctccagagagtcgatgaaaatagtgctttcatttatgaacgctgaaatagctgagacagcgaaattcatcttgattgtatcaaaacgagacatatgggaaagttgcgagtgcgcaaaaaaatgacgtagattcagtcaaaacagctgtaagtgacttaattcctctagagagccaatgaaaacagtgctttcaagtaaagtgctgccctcttctgccaattcccaacctgaaaatgtgtttgttgtgtgtccaaaacgcaaccacaaaagcatgcagaagatagcacttacggctgtctttccttacaatagcctaatatgaaaatgaaatatacccttcgcatgtaattgaaataaaaacggtcgatttttaagcatccaaacgatttgtaggagtcttcaggacgattagtggaaatttgacaaagaacagaggcttcttttaataaaattttccgatcagaagcttctgagcctgttttctcaaaacttcatttttgcacctactgctctcttcgccgcgccatcacggcagtataggtactctagtttttccatctccttaaaaatctttgatttcaccgatgacgaatccttgaaactaaagtacctttatagggagagtatggacaactcgaaactttggaggctaggtttgatcaggtcatgtagctctcagggcccaaaaggggagccaacttatgaacttgaattatccagtcgtacaaatgttcacatcttgactatatacactgatcaaaaattataaaagcacttataatacgtgcacgatttcgcttacattttttcagtttcaaagttttaatccttaaagacgcttgtttgtaatgtgctgtcggccatattgagtgatcttccaaatgcataggttggcagcggtacttttctagtgattttcgtttttcacgttgtcgcccttttgggccctaagagctacatacatcgagttgtctatactctccctatctacttgtactctacttaaaacggccttgatccgcgactttcaaaccgctttgataaacccaggataatgagttggcacatccgtgcagtctgcagtgcgtctttattttcgtatcgcgcttaagcagcgggggaacggaggagcaggaaacaaagacttttttatttccagctgaggattaggggaaataaaaaagcaatcaaaagcgactgcgaatgcaaacggcgcgcagctcgacgcgtcatcattatgcacacacgggcgcgctcgccaccttcggattggcctattttttcgtccgcgccagccaggagtggaaagcgaaattgggtcgtcgcggaaattaaaaaatgaataaaatcgggggccattcgacgctgttctcttatctattcagcacgcaggaagatgcaaaatttctggaaatcttacaaaattaattttcataaatttttttttttttttaaaacgcttgacagactcccgactcccctcccctctttgagatccttaaggtgattcgatggacgccatattttgtgtcagaacggcatgcgatatatcgcatcaattggttcctttttttcagctactcgtcttttttctccaattttgagatcgcaattctgttgtcaggagactaaagcactcacttaccgattttaactaagaaattcaacctaataaaggcgtggtttttttaaagagaaaatatcgcattcgagtgcagtttcgatatcagtatcgaatgcgatgttttctctcaaaaaaaccacgcctttagtacgttgaatttctttgttaaaattggtaagtaagtgctttagtctcctgacaacagaattgcgatctcaaaataggaggaaaatgacgaatagctgaaaaaatggaaccaattttattgatgcgatatatcgcatgccgttctgacacaaaatatggcgtccatcgaatcaccttatgcattctgatatatatagaacacgattctcgtagaacacgatttttgcatcgaaaattactgaaagtaactcataacttagatattaaagatttcaataaacattggttatgggaattttggatcgcccggtcacaagaaactcaattctctacgtgagtcaaatcgcgcctcacaacgattttggcaggcttctcaatcgagcattgttcctttctcacccttatcgttcaaagtgtaaacaatttgctatagcagagccgaagcgtcaatactgaggttgccagattttcatatcgcagatattgtcatggtaaagtttaatgtgcgatttgactcacgtagtctattgtgttttcatgagcgggaggtttgaattcacgcgtcaagaatattaaatatcttagataggagtagatttcagtaattttcgtcgcccaaatcgtgttttatgtgaaattttggtcaggaaacatgcgcttgaacgcttaatttcgtactttgtcttaaggttcattgtgggaaaactgaagaatattgctggataaaattcgaagtatattaaaatgacagcgtaacaaaaaagttgaagaaatgaggatggtacattttggatgttgtgtgttctttagctattcattgaaaggattgcgtaacgctggcactgccccccctcccccgtcgtccctttgtaaagcaggctcatacctcctccttcagagcgttacggactttattaacgctccgtaagatggccccttgccgaccctacaattgaccgcccacatcttcagacaaagtattttgctccttagacattacagtgcttaaaggcatccatgacacatgacatcaacttaagacaagagaaacatcacatcaactgttaaacctaactgtaatcgtaatttaagattcggcattttcgcagccaggaaagagaccaaaacccatgccatttttggactaccatctgatagagagtgaagtatctcaagacgtaatgcgaaatggtgccaccatacacattcatcaggaatatgtccaaaattttcactttcaaaaactatgaaaagtccggagatatcagaaaatctcaaaattcaaggagttctttctttcgccctgttacaaacttcgtgtaggtaacttcttgaaatatttttccatgcgcttttccagaatggaaactatttatcattggcaataagaaattgggagaagtaatttctctcctgattttcacgcttgttcacgaatcttttccaaatgaaagtgacctaaaatcccgttaatgaagaggagggggctcagctaccctccctgtttcttccttccaaacgcatcgtaatgattcactattgaatgtggaactaattttgacggaagatcaatatttgtgagtcgggtgtgtttcatttccaagactagctcattatgcgcgttgtcaagtctgataatgacgtttattttcccaattcaggacagtatagcttctttgattgaagagaagacaagtaggaatagtaataaaaatacatgattactacaaacccttctttaccgggttccgggttggtatatgaatcaaaatatttggctcgtttcatagtctcatatcatcccccatttaaaatttcaaaaggaaagaaaaagaaaaattatttgtcttaactttctaaaggtgattcgatggaagccatatttcgtgtaagaacggcatgcgatatatcgcatcaattggttccattttttcagctactcgtcatttttctccaattttgagatcgcaattctgttgtcaggagactaaagcacccacttaccaattttaacaaagaaactcaacgtaataaaggcgtggtttttttagagagaaaacatcgcattcgatactgataccgaaactgcacttgaatgtgatattttctctctaataaaaccacgcctttattacgttgagtttctttgttaaaattggtaagtgaaagctctagtctcctgacaacagaattgcgatctcaaaattggagaaaaatgacgagtaaccaattgatgcgatatatcgcatgccgttctgacacaaaatatggcgtccatcgaatcaccttagttttcaaaatttcaccaactaaactgagcttactacggatgttttgaaagtctacctttaaaggtatgttttgtgtaagcttcttaccatcgcagattgaatgaaggacgaagacgccattggaagctcatcctgtgagtttatgaacatttttctcgattttgaaagagaatgagtttaaaatctcaaaattacttcaagcttcaacatgactcatataaagttactccggagctgaaaattgagttgaagtctgtttcaagtcggaaagtccatacgtcgtttgtgtttgatcattgtattttcacgcgtttttccattcgacgtggcagacccgatctgggccctgctccaaaaaaaagtgacgtcacctgattaatgactaattgtataagtcaccggctttgatgggttcagggtcttatcgggccgtcctgaaaatacattgacacattccggctaatgttctattcgggctatttaccgagccaattatctgcagtcggcgttgctcagtcagacgtattgtcccggaggtctttcggatcttgaaatgatgatgcatgtcctctggcaatcacctcttttacattaaattattttaatgacttgagattcaaaatttaatttttgtaccttaaagaacggtcaaaagtttgaaaaaagaaagaaaagaacgattcagtttttttttttactttcaatcgaatgacgtctttaaagtcaaacaaaattaatgttgtcgtcgacttcaaagtcatttttagttcaatgaaagacatttccatctaaatcgaaacatgtgatctctatgtgtgtgtgtgtatatatatatatatatatatatatatatatatatatatatatatatatatatatgaagaaagtgtgttgtgaattaataggagctttacttgcaacgtttcagaaatttggaccaggctttattctttttttgtacgttaaaagaaaagaaaagaaagaaacaacctaaaaattgcgtcgaaatttctgcgagtatgctgaaatgatttatagaaaacttcgtagtaaatgttaagaaaaacatttaatcagttttttttttttttttttttttttttttttttaattagctaaaaatataactgcgtggagatctgcaacgcggctgagataaataagcttttttttcgcgcagagccattgatatttgacttcatttgcggaaggcgctctttagataactattcgaccataaggtgctgtccatattgcagctagctggaattgaaggcgcgtcacgcggcgaaaatgacacgaccacgctgcgtagcgccgaaaaacgaggaccacgcgtcataattctcgactgcttctcgtttctatcataacttaaggaaaaatatgtaacttatttttgacttttcagaatctcggaccatgtttaattttttattcgttcaaggaaaagggaaaaaaaatcttcctgtccaaaaatttaaccctctcagtttcaagagactttgtgctcaaaatctgtttgtaggtctctgggtgttggcacctttttaattttttccccgttttacaagactgatagtatagtttgttcctttttttcggatgtcccgaattatttattgttttcgaaaaatcataaaaaaactcaactttaatcataatttgatcaatttcaataactctatctctctcccattatgctcggtggttcattttatgcccataaaaaaaaaaattatccgtaaatacagcggatgtggtcgtttttaacttctctgtatcttgcataaaatttaaatttctaaagcccattttttagaggaggatatgctctatactgaactccttgaccgaatcctatatgctgcacgagcagcaaaacgcacagttttagttttgaaaacttgaagcaggattttctcaaaacttaaaagcgtgacatccgccgcttttacgtatgaggcctcatttctttttcactctgagtaaatatgtttactttccatcttgctttttttctctcccgtcttttgctcttatcttgtcgcgcgtggcctcattttctggcggcgccttgaccaccttttccgctcatgtcaaaattcctaggtactcattttgtttatgtaatgaatgggggaacgaacggtaaagcattgaaatcattcactcttcagtgcgcgatttctttttttgtgagggggaagtttgaatcgaaatacgttaatttcgtttttaggagttacgatcagcagagtgtctacaagtccggaatttccggaaagtccggaaattgtactgattttttaagggcggtacggaccttgcttgtctatcaattttaatagtcagtccgcagcagtttcatataacttcatggcatttcacgaagtatcatttctcgaagtttcatgaaattttgcactgaaaaaaatactccggccgtgggagccgcacttacggggtttatagacataccgtccgcgttccgggcgttgcacccgcggagcaattgaagttacagctccagcaccaggaactttcggcctctgagtctggaacggacaatatgtctgtatagtccgtaatttttttttatcagtgtgcatctttgccaagctagagtccctttatacccagagttacgacaactcacttttggttgggccaggattgggctgaaagtggcctaaaaaaaaatccaactctgattggttctcgctcatggaggccgaaactagtgcaccaagatggcggtacctcgaatgtgaacaagaataatgaaaatattacctaattgtggtttatcaagagtaaattgttatttccataggtccaaaatgaaaatagattaagaaattattcacaaaccaatctcattttatttttaattgatcactttgttgatgttgttgtttttgtgtggcagacatcgcaggattcctgatccttatccctcaatatcgttcgtttgggtgcactagtttcggcctccatggccagccaaggtcggctgccagtcagctgataatcgagttgtcgttactctgggtataaagggactctatgccaagcgaggattgagattctccgagacagctaccacactggaaaaaaaaaaacacattagatctagagtccagacacttgaaaacattgacaggaaaaaatactcttttgattcaatcggatttttgcttgaatcaaaacgaaatgcggttaaattaagagactcggttcttgatttaagctagattctgattgaatctagagtactttttcttgtcgatgtcttcaagagtctggccgcagactcaagatccaatgtgtttttctttccagtgcaagctatccgcatgcggacatcgttaaaacatttttccagtacaaaatccaccacgagcatcgtaagagctccaattccttttttccgggagatgctgcatgtgcagtacgaagcaatccatcgtggctgcatgcaacgattctcgatctcgagtagaaaacggcgccggtatgcaaaacgtcatgtcatgaacccagttccgcgatcgcagcctgcgctctcgataacggaagagaggagaggttcgagatgttgaatgggaacgaggaaactggaaatggagaaaacgatcgagtgaagtagatcgctgcgagcacgctcgtcgtcgcacagtggaaccagggctgccagtcagggaataccgggaaaaccgggggatgtcagggaaaataacgaaaatgccagggaaaatgacgaaattgtcagggaaaatcgtcaagtcgcctctatttcttatcttgagtggatttgaagttttgaagaacaaattttgccaaaaaactaagtatgtaaaattgtgtctttttgccatattcagggttgccacagtccggaaaaaccgagaaatgtcagggaatttcaaaaagtcagggaaaaccgggaaatgtcgaggaaaatgacggaaatgtcagagaaaatcgtcaagtcaccgtcgttatttcctttcttgaacgggtgtgacgttttgaagaacaaatgttgccaaaaaactatttaaaattatgtctttttgccatgttgcatatgtcatttgtcaggaaattttactcaaatgtgtcagggaaaatcgggaatgtcagggaattttaaatagtcagagaaaacgtggaattgtcagggaaaatcaccaagtcacctttttcctttcttgagcggggttgacgttttgaagaacaaattttgtcaaaaaaatatttaaaattatgtcttttttgccatattgcatgttttcagttgtcagagaagttcacgaaaacgtgtcagagaaaaccgggaatgtcagggaattccaaaaagtcagggaaaacctggaaatgtcagggataatgacgaaaatgtcaaagaaaatcgtcaagtcacctttatttcctttcttgagtgggttagaccacatttagaacacattttgccaataaaatattttaaattatgtcttttttgccatattgcatttgtttagttgtcatggaaatttacgaaaatatttcagggaaatgtcagggaatttaattttctaaatttcgtggcaaccctgtgggacgagccaacaggagaggtcagacatgtaatttttcactaaaatttcaaatttcaatgtttctttcgtcctaaattaaattgcaaggggtgtttctgaaagaaaattacacgaaaaaaccaacgaacccactcttgaactcttttgtttcatatgttcgaaaatataagcttccaaagtctctaggttttgtccgacgtctccaagtgacccggtccagtgtgcgtcggtgcaatcgccgctctcggcgactcccccgattttcgccgcaatcacgtccggggaaaaccgccccaactggcaacgtcgcccgtgataagtgtgataagtcaaacgattggattcaattccgcgccggcgcggacggagatgccaaattttatgaaattttaagaaattacgtttcgcagtgaatctttagattctcggaaaatctttattagactcgcaggatttcgcaggaggtctggaaaaccgggaaagttaggggctatccttaaattacgtgacgcacactggaaaaaaagtctcttggatctagagtccagactcttgaaaacatcgacaaaaaaaaatactcttgattcaatcagatttttgcttaaatcaaaaggaaatccgctcaaattaagaggctgggttcttgatttaagcttaaatctgattgaatcaagagtattttttcttgtcgatgtttttaagagtctggactctagatccaatgtgttttttttttttttttccagtggagtttgtcatcttgaagatgtttctgactcacaatgatagttcattttcaaatgtttcgttcaaaactacttcaaacttgggtagaaaatgggcgggcatgtatttttcttgtcgatgtttttgagaggcaggactgtagatccaatgtgttattttttttttttttttttccagtgagggtttctggaggtctagaaaaccgggaaagttaggggctgtccttaaattacgcgacgcacactggaaaaaaagtcgcatggatctagagtccagacccataattacattggcaagaaaaaatattcttgattcaatccgatttttccttaaatcgaagagccgatcagcctcttgcgatttaggcggattttcttttgattcaaactaaaagtctgattgagtcaagagtattttttcttgtgaatgttttcaagagtctggaccctagatccaagcgacttttttttccagtgcgcgtttgcggaacttttgacccttactattccataggaaccacccattttaaccgataggattgctccatactccctatgtctaccttgtctatagctttgtctatcaatttcaataattagtccgcagagttcttaactgattctcggttatttgttgcggggtatttgctcgacccctggaaattccacgaaattttatgaaattctctcaacaaaagaaattttacatttcaaatggagtttaatggtaatttattctgggaacttttattttgaatccttgggcgtggcacggtggcagtctagcctctcgagtgttgccataatttgaaatttttggattcttttccctcgcggatttttcatagttgctgcagtagcgaggcgtgaatggtcgataatcgatatttccccatttgaagccatggtaaagaatcgattcagtggcgaggcgtgaatgatcattatcgatatcttccctttgaagctatgataaagaatcgattatgaaggtgttcgttgcgaacaccctgtttatcgatccttttccataggtttaaatggtagattaatcgatacatcgcaaagcacgccagaccactgaatcgattcttaaggtgtttgttgggaacaccctgtttattgatccttttccaataatggtgtgaatggcagattaatcgatgtatcgtaaaacacgccacgcctcttcatataaatggaaaaaaaaatgaaattgatttttttttttataaaatttttcgtcctcgtttcgaaagggagataagtgacatacagcaggggtctagaaagctttggccttttgtcgctatagagcactttttcctcacaatgaactacttaagtctccgatactcctctagatccacttatgtttcttgaaatttacactgattttccccgaaataatccctcgagaataaggaaacataagctattaaaacattatacaattatacttattaaaacattatacaacattatacattacacaaggaaacattagaaaagctatccatatttttcctcataatttttagtcattttaggataaatcccgtacaaaatcgcctgaaaattttgaagaaaagtattcacaattttcccagtaaattatttttttatcgaaggaaaaatgacaacgtctagaggctcatgtggcgtttttccttagcacggcagtatagtcagagaatacgcaaatcggccctcttaaactcgtctttctcacggaatatcttgcagaaaaatcgtctttacgtggcaacttttggcatttgtgcgcacgaattgtgcctatttataagagccgacagatcgggtgggatcggatccgccagacggcgagggcgggcgggccgtgaacttgagcgaaaatgtaaaatgttatctcgacaaaggtcgggatttgccattgttacgtgtctcgcctgacggcagcgctgcgcccgctaggcatgctcgattacttaaaaaaatcgaataatcgataatcggtaatcggtaatcgaaacatgtagctaatgattaagcgattaaacggcagcgaaataataaatcaatctagaatcgattattcatagacagttagcgaaatattctaaaaatgcctagtttgacgactgaaatcgcttgcatgttttatcatttgacgcgagaaaacgaccatattaacagataatcggtaatcgaaacatgtgtccgattacatagaaaagtcgaataatcggtaatcgaaacacgtagcgaatcggtcaagcgattgaacggcagcgaaataataaattaatctagaatcgatttttctcagacagtttttgaaatattctaaaaacgcccagtttgacgactgaagtcgcttgaacgttttattatttggcgcgagaaaacgatcatataaacaaataatcggtaatcgaaacatgtagctaatgattaagtgactaaacggcagcgaaataataaattaatctagaatcgattattcatagacagttttcgaaacattctaaaaatgcctagtttgacgactgaagtcgcttgaatgtattgttatttggcgcgagaaaacgttcctcgtcttttttcggctgttgatctatccactaggtagatgatgagcttcgggtgacgtcatgaaccaagcgagtttaaaaaacttcagtttgtttgcaaaacgaactactcaacgcgctgtcaagaatccacctaatagttatgtcaacagttgaatgttgaagagcctaaagtaaaagcctccaccattgtcaaaatgccaatgctgccttgccaagtaaaaacgcccagtggcgtggcgtgctttgcgatatatcgactgatctgtcttttaaacctatggaaaaggatcgcacagaaaaaaatggatggtgctgacgacagaaccttttgttcatacggctcccacagtttctttgttacacttacagaacttttggtcgtgggaacagagtactctgttgccacgacagaagttctgttctcacaacagaaaagttctgtaagtgtaacaaaggaactgtgggagccgtatgaacaaaaggttctgtcgtcagcaccatccatttttttctgtgcgacaaacagggtgttggcaacgaataccttaataatcgattctttaccgtagctttaaatggaggaatatcgataattataatcgatcattcacgccactcctctgagaaaacatttatttttgaggaaagttatgaatatttgtccttgcaactttcagactttttagatcaaattacgaacgaaagcctctgaaaaattggaagagaaatattcacaaattttcctgaatatccatgatatttcgaaggaaactttgcaacgcctgatggctcatacgacgttctgccttagcacggcagaatggagggtctctccttgtctcggactgtatctcttgcctgcttgtaacaggccctttcagactgacagggtgtctacaagtccggaaatagtactaattttgtaagggcggtccagaagtactgaaaaagtgcggcaatttcactagaaggtccggaattttttcatttttcgtcatttttgttgaaatttaagggagaagttcaaatttttgaaaattttcgaattctgtcaattggaggtactgaaaaagtactgaatttttctgttgaggaagtactgaattttttgggaatgtactgaaaaagtgccgtaaaagtactagacaccctgctccctgcaccccttaaaattcaaaatgtgacgaaataaacatgaaaatttgcagatttagtcaacaatttggaccgcgtttaacggagaggaaccaagctacatcaactattgccaaatttaacagggcaatttaattttttacgagagaacgttagtgcggattcctttgaaaattttaagaaatttgctctgtattgtggcaaaaattcactgaaatatacacgaatggaggtactgaaaaagtatactgcatttttctggcgaggaggtacagaatttcttgggaatgtactgaaaaggttctgcaaaagtactgatttttggccagcctgttttagtagacaccctggcctctctttgtctttgactgtatatcttgtctgcctgtactaggcccatcaggctgatctttatccatcttctgattgcagatttgacttgtgctgggtgcaaatcggacttttgattatgggagtgaaagtgcacgcggagaaaagagaaaaaggcatcgggactggcacaagacacctgcggctctgatgcgcggcgcctgagcacccaccccacgtcatccaccatccatccgccaacgatgagtaaatgaccctccgcccagccctgtccgacgtgaaggccatgctcagcgattgagactcgcaacccctgtgacgttcaccatctacacttgctacttcaaggtaaatcactttggaatttccttcgtcaaatttgacaccccacgccgatcaaatgtatggatccagcaggttggtaagacagcgagccgaccattgaaactgataggccaagctaaaaacgaagaagaccaaaggggtatggaatgatcacattggtaaaagcaggtggttgcaattcgtcgtctcccgcacgaaagaacgtaactccattccaaggttaccaaattgactcaaacaatttacttcattttaccaaattttacccgtgctattccgtcaaaaatttgtctgatttttgcacggaatccaaggaaaaatcagtgacattttcagttaggaatgccctaaattctcttgattatatgcgatttgcgagggagaaattttacaacattgacatggagttacgttcttccgtgaagaagacgacgaattgacaaaggaggtataggtagtagactaagtaacgacaacttatgagagaccctatagttagtctatcattattcattttcttcctcagtctataggaaccgctcaaccaaccaataggattactccatacttcctatgttttccttgtgtatagctttgtctatcaatgtcaataatcagcccgctcgcttttctcaatttacacctgtgatgatcaatcgattcatatcaaagcacctggaccctcagagaatcattttgaataatcgaagctccattgtgtctgtgtcgaaagtaatttgcaataccaccttcaggatttgatttctgaatttcctgtcgcgagaatcgttttttagtaagattttgaggacacgtgctgttttctttcgattcggacctcgtctagatagtgcgacccattaaatctgttctgaagtctcagaatgtacatcgagcaagctcaaaatttcatctctaatacatttcatgttgaatatttttcggaagaagccgtctggacagccctcttttccaaagagggctgaaagggctcatcacttgaaactgtccgggtaccagtatcacactagaaaaaaaaacaatttccaggctatatagatgtaccgtccgttccgggcttagagaccgtaagttccgggtgctggagtcgtagctacagggtgtccggaaagttcggaaatagtactgattattaagggcggtccggaaattctgaaaaagtgcggaaatttcacaagaaagccggcattttttttcttttttgtcatttttcctcgcgatttacgggagaaattaaaattcttgaaatttttcgaatttcatcaaatggaggcactggaaatgtattgattttttctgtcgaggaggtactgaattcctcgagagtgaattgaaaaagtactgcaaaagcactgctttttggccagcctgcgcccagaactttcggcctcggtgcccggaacgcagacggtatgtctatacagcccgtaattacggcttcaacggccgaattttttttcagtgcatgcttggaccgccgagggccgtgcctgcaatttttcataacccctgcgaaaactttaaaagctttcctttgaacctctttcatccgaggaggatcacggatgaaaggggttaggcggaagacgggaagacgatctggacgtggcgcggcgtcgcgtcggcggatgcaatccgttgcgatgcgggcgtcgcacagtgggccagggaggcccgttttacgcgaaaaataccgtttttatgagtgtccagtattgtattgatgatgaggaattcgttaaagtgactctctaagggatgagaattcatcaaaatttcatcgaataatcgcccagcagcgatgtattggaggggggaacttgggtacctctcacactgcacggataatatgtagtagcgcgtcctgaactgcaaccgtgtaaggccttatcacggttcagcggtttcgcggggtaaaaatttgttcactaggacttattctcctaagaaagagctttcatttgatgtatacactttttccattgcgcacttttcactgtccaaaaagcttgttagaaaatgtgcctaataaatcttaaaaattccatcgaaaaagctttctgcagttttttctttaagtttccttagagttttagggccagatacttattctttaaatcctcaacattcatttgcactacagctttgctgcgggaaactgcgggaaacccatttttttaatttttttaataaaaaagtcgactcatcaaaaataggtttaagttcatgtatcacatatatgaccttagatatcgtacaataaataaattcttccgagtgaatagtaataatattattaaattgagctgctacgctactgagggtgcgcaatttttccatggttgccacattttctcgtatttaataactacaaaaaaggttctcagatgagacgatactataaatctgtctgtcattctgtctttcatatttttcttcttttccgtaagtgaaattattaataaatagtaccatacgggtactatatgtgacccagcaggacaaaatgcgcctttaaaggaaagctgatattgtttagtacatcagaaaatagtttgagggtaaaaaaaaaccccacactacttcagttttcaatgatgataattcctaatgtaatattctgaagggcatttggatcaatctctggagccatgatttgcgttatttataatgtaagcttttaaggtggatcgttcctcaagataagcaactgtgcagacaaactttaactggtatttacttgggaaacttgtgtttctccctcggacttttaaatgctgcaaagaggtcaaattcaggaatttttcagttataactttgtgccaactaatgcagaactaacccctctaacccatggtactgttcacctaaaggcaaattttgtcctgctgcttcacttatgtcgtttgctttcctgaatgtaattgtgtcctttcacataccagaccatcacagcaactcacctacggttttcgtgcttctcaaatgtattgacgatttcaatcgcactagaagctgctattgttgactagctcaatcgacggcaaatccgtggatatttgaatttagatctgatttgatacaaaactttttgttctcttttttttttttatttttattcaaatttctgaattttgagctttgttagccgataattggtaaacatttgggcggaacttattgaagtccaagaatgttgcaccaaatgcaagagtggtaaatagatactgttcagctgaccgtcatttccaataaacgttgtaagtaaatgttgtccattctcatgccaagcgccgctaaacaaaaattcatagaatgcttttttgatcctctgacatgatacttgatagcttacaacagcaaaacgtagaaacatgaaaccatggagggcattactttgcaaaattattttcacttaaacatggtaacccacaagaaccaataatacgaggagacagtgaccaaaaagaaaaaaaaattaacatgtaaagcgttcctaggtgaacattctcgtcttttatacgtctaattttaacaatattagatcgttttccagactcttcttggtcacatccaagttctcaattttgtttctgaaagtttctccagcgttaaaatggttcctaatctcagtgagattgctcataaaaaggaatcatcactggactagcgtatatcctcataacatacttttcctgtgatttttgaaaaaatctgatatcaaattcgagttcagcgacccaaaaaacccccgtaaaccaaaacttagtgattttcgttcggatttagccgagatatcaattattctcgcgcaaccggcacctctggcccacagtgcgtcgggcgaggaggattcaatattagaggagcgaagcgcgaagatgagacgtgtcgttgacccccgcggatggcatggaaatcggctcgcgtcccgtccatcgtcatcgtcgtcggtcgatgctgtggctcctccgtcgctgtttatttccgagtcgaacgacggaattgacgagtcgcgccggtgtcaatgtcacgcgcccgcccggctccctcgcgaggaatttctcgtggatcggcatcggcggcccgaaatagccgagccgaggcgccatcgcggctcccatccccgggtatcctccaaaaagagcttatggtcattcgtcaagctcaagcggtgcggtagaactgttttgcgatatcgcatcgattaggtcaaatatctcggcagattttgaatttttagcctaacaaagaacggtagcccctgcgagggttgccactgcagtcagggaaaaccggaaaattgtcatggtaaggcgtgccatatcgcctatggcagttatgtccgcactttccacgatgcgtccgataccttgggacgagggccatgctttcggacgcatcgtggaaagtgcggacataactgccataggcgatatggcacgccttaccatgacaaaatgtcagggaatgctaaaagtcagggaaacccgggaattgtcagggaaaatgacggaaatgtcagggcaaatttgttaaatcaccttcatttgttttctggaatgggtttgagattttgaacaagaaattttgcccgaaaactattttcaattatgccctcttaaccacccgtcacaccttcgatcgtcagggaatttcaccaaagtgtgtcagggaaatcagggaaatgttagggaatttaattttctaaattctgtggcaaccctgttttgaatttttagcccaagaaaaggacgacagcccctgcgcatgagccgaaaaaaatcattctaaaccaaaaaattatgaaaatttagggaaacgaaagcagaatcctgcttggaaaaacctcgcattcgatacagaaatcgataaccgtatcgaatgcgaggtttttttccaaacaggattctgcccagtttttatctaagttcccccctccccccccggctcgcnnnnnnnnnnnnnnnnnnnnnnnnnnnnnnnnnnnnccccccccccccgtatttgcgttacgtaatgcttaaacgaccctttagtagaaacacgtccgcgtctcgcggcagggtgtccacaagtccggagttaccggaaagtccggaaatagtacagatttttgaagggcggtccggaagcactgaaaaagtgcggaaatttggaagaaggtccggaattttttcatttttgtcgcaatttaagccagaaattcaaatttttgaaatttttcgcattccgtcaattggaggcactgaaaaagcactgaattttcccgctaaggaggtactgaatttcttgggaatgtactaaaaaagtacagtaaaagtactaattggactgcattttgcaattaggaactataaattctggctcctctggaaaaacacctatgtgcatagggaaactaatggcacatacgttgttttttaaccgggctagaatttatacttccaaatgggcctgttgcatgcaagagatacagccgcgcgaatagactttttagaggttaaatgacacgaaaattacgatggtcacattaaaaaagtctgaaatacactccttactgcgcaatttgcgttgttaggaacgcactttttcaaatttcccgcgtctgggggcagttttctaatcaccggaaacgagcaaacggcgggctcggcgaattccggaaaatgccgagtcgttgttgttgttgttgttgttgttgttattttttccttcagtttgtttacaaacccaacgtgatctctttttgtggtccatgtacgctttatgcggtaaccaaatcgatcagcttttaaatatccaacgcaattcttctacatttcatttcacgacgtcacgagctccgatttttaggttatgttgtcagttttagttgaccggaaatagccgcgagttgccattaattgtttccgttagaaaactgcccccagacgcgggaaatttgaaaaagcgcgttcctatcaacacaaattgcgcagtgaggagtgtatttcagacttttttaaagtgaccatcgtaattttcgtgtcatttaacctctgaaaagtctattcgcacggctgtatctcttgcatacaacaggcccattgcaaaatgtagtccaatttttggccagcctgtattagtagacaccttgcccgggctgtggcgagaagaatagaacggcgaagcggatcagaatttctctgaattggcatcggaggtagttgggagattgtgcaattaaacgccggtcggcccccttccgcccccctgcacggtgcgccgtcgttgttcgttgggagcaacactccctccgtcccccggcatcgagcggaggtgcttacggcaatctcgagtgccaagagaatttttctgttgtaaaatgatgcacgttatcagggcgacgacgagccaccaacgaacggcacacgtcgtgcttgccaaccgacgcgacgcacggtggatcggagcaataggtgttcagggttgccacaatcagggaaaagcgggaaatgtcagggaattttaaatagttagggaagaccgggaaataacagggaaaatgacgaaaatggcacagggaaaatttgttaaataaccttcatttgctttctagagtaggtttgagattttgaacaagaaattttgcttgaaagctattttcaattatgtcctctaaaccatcggtcacgtctccaattgtcagtgattgtcatcaaaatgtgtcaggaaaatcagggaattccattttctgaattctgtggcaaccctgaggagaggtcggacgaaatttggaaactttaaacgctcataactccgtttatacaatattttgaggttccgaaagtggtttcattggtttcctcgtaaaattttctgataggagcaccttttaaaatttaaaatgtgactgaataaccatcaaaatttgaagtttatcggccccggattagagttccgagaataaaacgggagtcccgtgtgcctttctgcgtaaattgatatttcggaacagcgggcccacgccgcacaatggatgaagtccataggtgaggtttgacagaatttggaaattttgaaagctcaaaactccgtttatacaaaataatgaggttctgaaagtggctccattggtttcctcgtgaaatttacttctagaaccacctcttaaaatttaaaatgtgacggaataaacgtcaaaatttgcagttttattcaaaaatttcatgtccgacctctctgattgactcgatccactgtgcgacgcgtcgcgacgcccgcttgcccgtcccccgaggctcccaaccgaacacggtaatattctaggggttcttcgtttaaatttttcttctgcagtagtttggagagcaatagaactgtaagtcgatcaatataagatcattcctgcggggtgattgttgaaattgatggacaaagctatagacaaagaagacgaaagggatttggagggatcctatcggtagaagcgggttgttgtaatggacaaaggaagtagataacagactaacaaacggcaacccacgagagaacctagttagtccatcattttctccctcagtctatataggaaccacacatttcaaccaataggacccctccatacttcctgtcttctttgtccatcgctttatctatctatttcaacaattggcctgctgaattttaggcatggtgtctagagcggagaaaaattggggaaatccaagattcgtcagggagtgaaaattttcaggggaagtcagggaatctattccagaaatcaggaagttctttttttaccgcctgcagtgagtgtgattatacttggactgccaccattgacctcttgaataaaatatcttcaaattatttttattgaccaaataatacatgtatacatcagcgggccgattattgaaatgtatagacagagaagacgtaaggagtatagagcgatcctattggtcgaagtgggtggttcttatggactaagagggtaaatgatggactaactatcgggtctctcgtgggttgccgttcgttagtctattacctacctcctttgtccattgcaaccacccgcttccaccgctgacccctccatatcctttttgtcttctttgtctattactttgtccatcaatttcaataatcagtctgctgggtcgcttttcgaattaaaaaggtgaatgtgcgttgaagaatcggctattccgtgactggaggttaaagtacctgttaaatattccaattttttcctctgtcgagctaaatttgactggaagtttgtggcaacaagaggttgtagaacgctactttggtgttcatccccctgtcaaatgttgccagcagtttgaccagaggtgatagaaccggctctaacagggtgtctaccggtccccaaagtccccgattgtccccgattctgggaaggtgtccccgatctccccgaatgtccccgattttcatgttcaggtccccaaaaactgaccaaaatcgtcctctgaaaatttcaaaatttttacggttgcgcgcaaagcggcagaaattcgaaccctcgctggcgtctttcggcgggaacggtccgaaactgcgggagctcgttatcaatatttcattttatgtcgctttctctcgtctattgtggtaaaaatgtccccaattttcatgaaaaaagtccccaaatgtccccgattctggttttttccagctggtagacaccctgctctaagaggaacgaagtttttcctccgtggtttttcgtcgtttcgtcgtcgtcgattcgccctcattaaccgggcgtcgctctgcagtggaagtttgagttgattaatcggatgaaaagtcgaaggagcgttaatagtccggggcggagaggaagaaagtgcgcgcgagtcggagtacgattccgattcggaataattacggagcgctccgcgatgcataattgcacgaagaccaatgacctacgccgcggcggagaccagacctgtctcgctccgacttaactgtatcccgcgacttgtgacttgtgagtcagcgcaatgatgccgaacccgacttaacctccgtcacgtcgcagtcaactcgaagcccattagggaagactttttatgaaaaattatgcacagtgagaaaaagtaatattttttcagcactggaaaaaaaaaacacattggatctagagtccagactcttaaaaacatcgacaagaaaaaggactcttgattcaatcagatttaagctttaatcaagaaccaagcctcttaatttgagcggatttccttttgatttaagcttaaatctgattgaatcaagagtcctttttcttgtcaatgttttcaagagtctggactctagatccaatgtgtttgtttgtttgttccagtgagggttgccacagtcagggaataccgggaaatgtcagggaatttgaaaaagtcagggaaaaccgggaaatatcatggaaagtgacgaaaatgtcagaaggaatgccacagtcagggaaacccgtaaagtgtcagggaatttaaaaaagtcagggaaaaccgagaaatatcagggaaagtgacgaaaatgtcaaaaggaatgccacagtcagggaaaaccgggaagtgtcagggaattttaaaaagtcaagaaaaaccgggaaatgtcaagaaaaatgacgaaaatgtcagggaaaatttgttagatcaccttcatttgctttctagaatgggtttgagattttgaacaagatgcctgaaaactattttcaactatgccttcttaaccacccgtcacatcttcaactgtcagggaatttcaccattataggcactctaaattcaacagggttgccaaagtcaggaagaaccgagaaaatcgggaaatgtcagggaatttcaaaaagtcaggaaaaacgggaaatatatcggggtaaatttgttaaatcaccttcatttgctttctagaatgagtttgagattttgaacaagaaatgcctgaaaactattttcaattatgccttcttaaccatccgtcacatcttcaattgtctgggaatttaaccaaaatgtgtcaaggaaatcagggaaatgtcaggaaatttcatctcccaaattctgtggcaacccccgagtaccgggaaaatcgggaaatgttaggaaaaaccgggaaatatcagggaaagtgacgaaaatgtcaggaaaaatttgttgaatcacctttatttgcttcctagaatgggtttgtggtttcgaacaacaaattttgctcgaaaacgattttcaattatttcttcttaaccacccgtcttatcttcaactgtcaggaagtttcaccatactgtagcagggacatcaggaaattgtccgaggaaattcggcatttattgaatgttcatacggcgttttcccatagcaaggcagtacaggtattcaatgcaaggaagccttggctgcttttgatagctcgcgtggagagcccgcgaaatccataaaaataaaaaaatcggtgcatgaaatgccacgtagcgttcgccatttcattcaaaggcctttaggtttccgccgcggtgatcgacgagtgactttaccgcctgacgcaccctctttcgcgagggcttttgacgtatacctatatagggtgatccaaaaaccccgcaccactatcaccaggcattaagcgtcacccctgtaattttcgaacaaattgagatggattgtacactttgtgaaagctctcgggttaaaggaaactacttttgggaccccctaaaattttaagggagtcaacaacataaaaagagacacactggaaaagaaaacacattgtatctagagcccagactcttgaaaacattgacaagaaaaaatacattgacaagaaaaaataccttgacaagaaaaaatactcttgattcaatcagatttaagcttaaatccaaaggaaatcagctcaaattaagaggctcggttcttgatttaagcaaaaatccgattgaatcaagagtattttttcttgtcgatgtttttaagagtctggactctagatccaaggatagggtgttttttttccagtgcaaaaaccccgcgaattataggcgttgtgaaggacttttggatcaccttgtacttttttatcgtgtcaaaagaaactcaagtcaaacagacatcagataaagctgaaacaacatgcacctcaactcacgaagtttcagatttcgagtcatatttttgaatgacagccgatggttgtttatttggacgtacttctgctaaacggaaccagagacgtgtgagaaagatggggtgtgctcttggcgagctgcataagaaacaatgtaaaagtgggcgtgattccttttggggaaatggaaatcttaattttgctgaacggaaccaagcgccaactgcatgcagcgcactcatgagccgtgggcatgtgccaacatcgtttgaacagggctcatgagttgaagagtcccgtccccatcccgaatacgtcacctctgacgtcactggcgcttcataattcccattcattcttacggcccgataactaacgagcatacctcttctttcccacctgtctctggttccgtttagcagaaattcgtccttttacatttttgttttgtactttctagaatattcgctcaaagctcgaattaaaatggcaaatgattcctttttcaaggagcaaaataagtgaggaaattttgaaacaccacatctgaggtacgttcctcgcaaataacactgttgatatctatcttaaccgcgagtatcgtaaaattcaacgcggataagttgcaaatgcattcaatatcacaccaagtcacgcgattcaaattgacggctgaatatacctttgttctttattcatgaaccctataatccgcagttgaccaatgaggtgtactgtatactaatacgacggagcgtttcgcctctgcaaaaagggtaatgatggagaaacatgcgtgtggttaccaattcgatcataaaaattgctcggacagacacataaataagtgaaaagtttagcaatttatcaacattataaaaaatgattaccaaaacacgattctgtgaccagcgcaactgacccatttcattttttacaagaaaacggttgtgtggatttttgtgcaaatttcagtgaattttctgcatagaacaaagcaaattccttaacattttcagaagactccgcaattgttgttccatttttgtaaaatatttcgattgttagagtgagtttggcaacctcggaatggagttacgttccttcgtccgggaaacgacgtattctgccgtgctaagaaaaaacgtcgtatgagcatttagatgttgccaaactgcctctcagaaaatatttatttctgatgactgttattcatattttgccttgaaattttcagaaaatttaagtcaaatcacgagcaaaattcttcaaaaaattggaaggaaaggtttacaaatattcccgaaaattcgagatttctcgaagaagatttggcaacgactgaaggctcatacggcgttctgccccagcacggcagtattgtgacgggtccagggtccggggtggcgcacagtgcgacatccttatggacgatccggacaaaaatcggaaaaagacacttaactttaaataaagaagataatagcaccggcatagtggcactatcaaagtaaaacactcgaggaataagaaaatgttatacctcaggagttcttgcgtatttatcgagaaaagttcattagaagttggcaacctcgaatcagccctatgttaacaatgtaaaagcaacgcgaaacacccaaactttaacttcaaatatctctgatagccgcaaaaagtcgcaagatctttttggtagaattgaagttggctatctgcggattaataaaatgtcaactgtccagagcattttgcgtttcaagcgagaaatcttcatctgaagttgacgtctttttcccgtgtatttcctatagaccagtgattctcgacccatttcccgctagggtgtctacaagtccggaaatagtactgattcttaacgggtggtccagaagtgctaaaaaagtgcggaattttgcaagaaggtctggaatttttttatttttttgtcatttttctcctaatttgagcgggaaattcaaacttgccgaatttcgtcaatttaaggtactgaaaacgtactaaatttttttgtcgaggaggcactaaatttctcgggaaagtactgtaaaagcactgatttttggttagcctgtcttagtagacaccctgcccgcccactttctactcaagttagaaggagttttgaacgaaaaatttgaaaatgaaccatcattgtgagtcagaaatactctggataaaaaaacacattgggtctagagtccagactcttaaaaacatcgacaagaaaaaatactcttgattcaatcggagttttgcttaaatcaagaaccaagcctcttaatttgagcgaatttccttttgattcaagcaaaaatcttattgaatcgagagtattttttcttgtcaatgttttcatgagtctggactctagatcccatgtcttttttttccagtgtccaaaaaacaaattttcagatgtcgagttgtgtacacatttttgtccacagagggccgtactgtgcggcggtatgagcggccaaattttctcgggcgcagacactataatgggccgctgggcatgggcaaatgggcagtctattaaaaattaaacttaaataactgctgctcgccccctcctcgccctcgctccttgtcgcggctcttgtttctcgctcgtcgcctgtccgtccacgtccactgacgtcgagcatcatattgtagaagcgccgcgacgcccgacgcccttcacccctccctttttccctacctccaaaatccacatggaattcgagcatgcagccgggattttcttgagcacccatatcgggaggtggggagggttaggtacggacgtgtcggtaattttgaggttaggtcgtggagggttgccagtcaggaaaaagtggaatatgtcagggaattttaaaaagtcagggaaaaccttgaaatgtcagggaaaattatgaaagcgtctgggaaaaattgttgattcgcctttagctccgctttagaataggtttagcgttttgaacaacaaattttgcctgaaaactattttaaattatgttttttttaatcatctggcgtccgaattttttttttcatttttgtcgcaatttgagcgagagtttcaaattttggaattttttcgaatttcgtcaattggaggtactgaaaaagtactcaatttatcagtcgagggggtactgaatttcttgtgaatgtactgaaaaagtaccgtataagcactgatttttggtcggcctattttagtatacaccctgtctgtgtaggcagcatgctctagttaaatccgcgtcaatatagccacgatatgatcgtcccgcaaaggttctaaatttcaaaggtgcatagaaactcaaatgtctgccctttctcgtatccctacctctttttggccagcctgttttattagacaccctgccggtggcaccatcgtgtttctcaggaaattttacgtaaggaaaaggacttaactccctgacacatgaataagctccatggaactagaagcctccttgagacatgattacgaagatgcgacgaagctgggcagcggtgccttgggagctttcgtccggtatcacgtgtcgcctgaaaatgaggctgggaatcttgaacttgggcggctggagccgggggaaacctttgagtgtgcggatcgacgatgacgacgcacagaggtccgaatcaatagtcgaggtcggacataatttggaaacttcaaaagcttttaactccgtatataccaaactttgaggttctaaaggtggtttcattggtttcctcgtgaaattttctactacaaacgtccctgaaaagcagggtccccgcagtcaggcaataccgggaaaaccgggaaatgtcaaggtatttgaaaaagtcaggaaaaacctagaatttttgggaaaatgataataatgtcaaaaatgtcaggggaaaattgtcaagccatctttatttgctttctagactaagcttgacatttcatacattatattttgcgtgaaaaccatctgaaatcatgaattccccgcagtcagataatattaggaaacccgggaaatgtcaaagaattttaaaaagtcagggaaaacctagaattttcagggaaaattataataatgtcgaaaatttcagggaaaaattgtcaagccacctttatttgctttctagactaggcttgacgtttcaaacaatatattttgcgtgaaaaccatctgaaatcatgtctttgtaaccatctagcatatcttcaattttcagggaatttcaccaaaatgtgacagggaaatcagcgaaatgtcgtgaaatttcattgtctacattctggggcaaccctgtaaaattccccccgtagaatgaagaaattgaaatcccctgacatttccctgatctccctgtcacattttggtaaaattccctaaaaattgaaggtattctagatggttgaaaagacaaaatttcaaatagttttttcctcaaaatctattgtttgaaacgtcggctcctcgaaaacaaataaaggtgacttgacaattattccctgacattttcgtcatttccccagactttttagaattccctgacatttcccggttttccctgactgtggcaaccctgactccgtttatataaaattttgaggttctcaaaatgggtccattggttttctcgtgaaattttcttcttaaagcacccctcgtttaaaatgtgacgaaattaaccaaaaaatttgcagatttaggcaaaaatttcaagtcgacctctccaaagacaaagatggagtgctcgtatctaaaagcacggggaaagtgaagcctggtttggcgctgggtgcttgtgtgagtgtgtaaatgagcgcgggaatccatggcggcaaacggaaatttgatttgaacttgtcctcttgatttttccacatttcttcgaaacgtattttaaatgcctaaaacgaatatattaagaaagttgggactgcgtcctattataatacacctacttttgctcggtaataggcagtaatctcagataaagttagtttttcttctgctcatggtggttctgcaggttcaaacaggccgtcacagtcgtagatgaccgttactcccaaatgaaattaatcggtcgacgacggactaaaactaacctaaagttataaaattatgagtgtgtaagtgaatttgggcaaaaatcaacctaaaatactttgtttccgcaattttattcagttcccgccctacatttgaatttcaaatttgtcccgatttcgccgccaatcctctagaacaacgttcctcccgtgacgtagaggtggttgaaacgaagcttcattttttgcttttagccctccgtctttatgtcttagggctcgatccatgtgacgaaattaacctaaaaattttcagatttaggcaaaaatttcaagtcgacctctgtgattgcctggatccaccgtgcgacgaccgtgacggtggcagggccaggccggggacccgcagggccgactcggagagcgagacagggacgggccgggacgtggagcgaggcgatggtgcgcggcggcggaggcgggatcgcgcgctcctcgcagaccgtagtccgtagtcgggtattaaccttaattaagtaaatgcccgggcccggccgactcgctttcgttccgagtcgcccaccgaacccggcccggcgtggcgacgcgacgccgtgcccgcacccacgcttcctcacgcctctcgaaggctcaaatacttgggtttctccccgaatttttcaggcgttgaatgtcctcgaaagaaagggtatcgataaaggttgttttttggtcaattctggttgaattttcttaactatcagggtgtctaccggtccccaaaagtctccaatgtccccgatatccccgaaagtccccaattttcttgttcaggcctcccaaaaatgaaaaaaaattgaccgaaacacaggcattttcaaattttcccgccggccacggtggcgcggtatggtcaggaatagaaaaactgaagtgttgcttggtttttcgtatgttttcatcggtgcaacatgactcgtaaaattagtcgtttgaaatacgtacgccttttaacgctttaactagttctctttctcttacgatgtcgggaaaaaagtccccgatttttttgaaaaaaacacccccgaaagtccctaattttgattttttataactggtagacaccctgactatacaattttttgcttattgaatttctacactacacgaatacctcatgctttggacattgccggtttcgtttcaagtctattactctgcctgcagggtggctcgggtggtccggacgaaagtccggaaacatcagtgatttttttagggcagggcgaaagatctgacaaagttcggaaattccgcaagaaaatccggaatttttatcttcatactctgcgtgttttttaatgaagcctggaaagaatgcaatcccctgcgcgttgtttctttggcgtagtatttgtctgcaagatcgcgattttgcagtcagttaatcttcaagccaccaatgaaatcttgtgtctgcttcatttttgtctcaattcggtctcagttttgtctcaatttgtctccaattttggtccgacgcgacgacgcctgcctgcgtggaacgcgtattagcgcctccaagacggcagggatacttcacgcattgggcgaaacgcaccgtggcatacgtgcagtgcgagaagtatccttttcgtgtacgcgcaatgcgtgaagtatcctcgcagtcttgtaggcgctaatgctggccacaatgtgttggaatctaaaattcaaacccagtgtctgtatttttcaactcatgattttggaaaactattcccaactgatttgacgatttaactcggttccttttctcatttttttatattttgttccattttcttgttatctgtttttgattcacattctggaagtatcaattgagtccatttgtcctgaagaacttgtcaggcaaaactgaaggcaactgaactgaactgacggcgaaagtccgaaaataattaaggaatgccgcaggctgattattgaaattgatagaagaagctatagacaaagaaggcataggaagtatagagcgatcctattggttaattcgggtggttcttactgactaagggagaaaaaggtggactaactaaagggtctctagtgggttgccgttagtttttctattacttcgtccattgcaaccacccgcttccatctataggatccatttatacccctttcttcttcttcttgtatagctttgtctatcaatttctgtgatcggcccgcaggtctaagctgctgtgctaaggaagaacgccgtatgagcattcaagagtcgccaaatttccttcgataaaatttttatttggaaaaagtgccgaacatttttccttgaaattttcaagaactcaaggttaaattacgaacaaaattagttgaaaaattagggaaaatgcatagattagtttaccgggaaattcgcgttttatccaaggaaatttggcaatgcctgaaggttcatacggcatcttttaccgagcacggcagtagggacgtgggtaatgtagtcaacattgggacagtttacgttagaatccgtgtaaattcggatcagcacagcctcgcctttggcaggaaatgacccatttttgacgtaattagagcgctccgaacactcgttcttggaccgcgtcaagtggtcgcctccgacttcgatttaaacgccaacggaacgggttgtaaatcgacacgtttcgcgatgacgcgatcgcagaccgtgcacatggccacatgaggaaccgccacttcgtcctctctagcctccaatcaagtgtcatagaatcgtttaccaaaaaactgacctaattcgtgtctaaatggtagggaaatgttgccagatcatcaattaaacagtggcgaacaacgacgattccacgatttgagtcgtgaagtaaacctcgcgcaaaaatccccttcaatctgacagctatgcaacatgcacgccctgacaagcaacgaatgcatagtggtgtcagtgtctgctatccaaaactattttcaattttatcttcctaatcatctgtcgtattttcaattgtcaggggatttcacctaattgagtcagggaaatcaggaaaatgtcaggggatttcatttttcaaattctgtatagtaactctgtcagggtgtttacaagtctggaagtagcactggttttttataggcggtccggaagtactgaaaattacggaaattcccttagaaggtccggaatttgttttatttttctgtcatttttgtcgcaatttgagcaagaaattcaaatttttgaaattttttcgaattttgtccggtagagttactgaaaaagtactgaatttttgggaatgtactgaaaaagtacctcctgggaaaaaaagtcgcttggatgtagagtccagactctaaataacattgagaagaaaaaatattctcggttcaatccgatttttacctgaatagaaaatccgagtctcttgatttagccggattcccttttgatccaagcaaaaagtccgattgaatcaagagtgtttcctcttgtcaatgtgtttaagagtctggactccagatccaagcgacttttttccagtgtgtataagcactgatttttggtcagcctgtttcagtagacaccctgtctgcgtaggcatgcatgttctagttgaatccgcgtcaattcagccacgatatgatcgtcctgcaaaggctttaagcttcaaaggtgcaaagaaacgcaaatgtctgccctttctcgtatccctaccctctctcctctgtacctcgccagtttcgtttcgacggcaggttgcccgccgttgcgttgcgttggttcgtgctacggcgctctaaatcaagtatcgggcatctctcccttcagctctgcgcgagccctggattcgactatcacgagttttgatttactcgcctcgcacgagccagcccccggtgtacctgctgtacccacatgctcccggtgaaagtgcttcgccgtacagtggatcgagtcaataggagacgtctgacatgaaattttttactataatctcaaatttcgatgtttatttcgtcacaaattcaatttcatggagtgtttctgaaaggaaatttcacgaaaaacccaatagaacgactttagaatattttgtctcctatttggacgtatttatgctaaatggaactgtatgcagagggaaagatgggatgtgctcgtttgtggtcgggccataaaaatgaatggggaatgtaaagcgccagtgacgtcagcggcaacgacgagagtagcatagtaacaacgatcgggaaggcgggaaaactaatgagccctgtccacaaggctctagatacatgcacacggctcacgagttagcgatccgttccttttgatttaattgaaaatcccgcttttccattttttcaaaaggaactatatccacttatacattgtttcatatccagcatccacgagcacaccccatctttccccttgcgcatagttccttttagcattaatacgtccatttgtgggattatatgctttcaaagattccagattttgtccgactttgtctattgcagggtgtctccaagtccggaaatagtactgcttttaaggtcggtccggaagtactgaaaaagtgctgaaattgcgcaagaaggtccggaattttatcatttctgtcgcgatttgagcgagaaattgaaatttttcgaatttcgtccattggagggactgagaaggtaatgaatttttttgtcaaggagatactgaatttcttgcgaatgtactgaaaaagtattgtaaaagcactgatttttggccaggttagtagacaccctgaataggagaagtcggacaaaatttggaaactttcaaagcttatatctccgtttatacaaaactttgatgctctaaaagtggttccattggtttcctagtgaaatttccttctatcagcaatcctcgaaattttaaatgtgaatcaaaaatttgcagctttagtaggtaaaaaaatttcatgtccgacctcttcaattgactcgatccacggtgcgccggtcggaataacgtcgctcctccggtgtaaaggcgtatctctatttcctccatgagcccccgaaagcatggatttatatgtgaaacagggtccacgtgaaaatcgagatacgttcttacgtcaggggagcgacgatattgcctcgcagctcgtatgcgtgtcgcaaacgaccaacgcaccgggctccgcgcttgcatacgcaaacgaaaataacgagattcaagtcctagcccgtgcgggaaaaacgacgtatcggtactcgggcgttgtcaagtttcttttgattatattggatcggtttctgctaggggagtgtaagcggtgtcagatccagagagggctcgagagggactggggcagattcaaaatttcgtgagactttctcagattaaatttcgtgaaattttataatggagatgttgcatgtgtgagggatttgcgatttgactgttgtttctcatgtataagttcgcgaaaaacacgatggtgccactggttttctctgaaatcaactcccaagctcaaaaaaagctctcaagttgaggccaaaatggaggggatatcccacgctatcctgagagtccacctctacatcaagacaaactctccatgcaaagatagggagcaaatacattagcagtgatgccgtattttcagttttagagtccccaaataaagtggcagccctgtcaatgtatttgctccctatctttgcatggagagtttgttttgatgtagtggtggactctcagggtagggcgggatatcccctccattttggcctcactttgagagctttttttgagcttgagagatgatttcagagaaaaccagtggcaccatcgtgtttctcgcgaacttttacatgagaaacaacagtcaaatcgcaaatccctcacacatgcaacatctccattttataaatttttgaatcctaccttggactcggtgtgccgtgaaacgcatagaaacagtaaaatctgaattttgaaattttggtgggaaaatttcatgagaattctaattgttgcaggttgcatacccagcccctgaaagtccacctttcagtttgatgggcgtatgtccacagaatgaaatatacgagagacaaaagaactgattttctcgttacgcaaaatgacttctaattttcttaagtgttcaaagtatgggtcaacgaaagttcaaaagttctgaaataaattttttcggtggaaaaatgtttaaatctaatgttttaatcacatcaatgttttaataacacggaagaagaatgaagcttgggaaagcaactgttctagaattaacacctacctaggggggagaaaaagtgctgagagctggaagttaattaaaggtttgcgtagagacatgaagcgcgacatcgtttctccgatatcacttaaaaaactggaggatcattttaaagatcttttgacggaaaggcgcccagagtttcgagacaacagcacggacaacggaagaatgaacaacttggagatccacacttgtgacataattaaagcggtcaaagagctgcaaaatgacaaagcaccgggtcctggtgggattcctgtcgagttggtcaagtacgggactgccaagctctttgagtgcctcagaaaactgatgcaacaatgcatcaggggtgacgaggtaccaagggagtggaaggagtcttggatcaaggccatctacaaaaagaagggaaggaaggacgactgtaacaactaccgggggctctcagtgaccgggacaataagcaaagtgtacgggaagatactgaaagcgaagatcgaggacgaatggcaggatcacgaagcagaggagcaggctggttttagagctggcaggtctacgatagatcacctctttgttattgtccaggtcattgagaagaaaatggccgtagctcaggaactgcatttaatttttgtggatctccagaaggcgtatgacagcgtgccgttggtgaaactttgggaggccttggaaaaatcgaattttaacggggggttgattgacgctgttaagcgattttataaagggagttttaccaaagttaagtgccatggggggttgtcagcgggattttatgtgactaagggtttaaaacagggatgttgtttgtcgccaacattatttaaaatttatctcgagtgcgtgctaaaagaatggaaaaagaaatgctctggtatgggtgttcccttgggtgatctcgaaactctgtttactctgtgctttgctgatgaccaggtggtggttgctcaagatcaagatgacgcggaatacatgatgcgcaagctagtagaagagtatcggaagtggggtctggaagtcagcatatccaaatctgagaagatgacttttggcggtgatcagcaaagcattgagttggaggatgggcagcagatcaaaggctgcgagcactttaagtacttgggagtgcggttgacccaggatggaaggacggatcaagctatcagggaaaggaacaccttagcaaggaaggctatagcgatgttaaatggaatcctctgggatcagcggatttccaaagataacaagaggaggatatacaacgctgtagtcaaaagtatattaacatacggatgtgaagtttggcagctgaagaaacggacacaggatatgctaagagcaacggagatggatttctggagaaggtcagcaggaatttctaggagagatcgggtccgtaatgatagagtgcgtcagataatggaagtcgaaaatgacatcgtgttcgacgtcatgaccaaacaacttgtttggtatggtcatgtcaataggatgacggaagagaggctgccaaaaaagatgcttgattgggttcctcctgggaggagacgtaggggacgcccagtgcgaggttggcgacagggggtgttaaatgagataagagattgtcaactccctgatgacctgtgggaagaccgagctttgtggcgattaggcgtcgcacagcgccaaagagcgctataaaagcgactcatatatatatatcacatcaatgctaatttaaaattgtgacacttaagcattgaaatcgcaagaaaaaaatgctctatcggatgaaatttggcagtattcgattgttgatgtggcgttattgcttaggagtagaatcccacctctgggtgcgtacttgacgcgcctttcatctcaaagccccgaacgaatctctcctcgtttacccatttgttctttaggttattgtttctttatttaagtaactctctcgactggtgctgtattcacccatacgctgttttgaactcatacttgttttgctaccaaaaaatcgtctggagtccttgcagggggatctatacaaccaaagatttctcttttttgcgagtgtgtgtgcaccagggccaggtgtcccttataccatgtggcaatttaataataagattaatttatcagtttgcacacgctgttatacacgcagttaaccctctatcattgaactaaaactatactaatggataccgtaaatattgtaatggtagttgtagataaaagaatacctacatgcgtgaacggatttaatgggccattcaagtacaatgtaacgcgcttgtcccgatttttttataccccctccccctttgtaacgcagccttacaccgccctttggaatcacgtaacgctggcccgactttcccctaattttcaaaagatatcactcgggaagagcgggattcttaatgtttttgcacctttttttcaaagttttgtaccctcacctcggcttcgatttgtaacgctaggtttaacccccctccccccttgtaacgcactgtaacgctggctcaaacccccccccccatttcgttatgtaatacttgaatggcccctaaccggaatcggcccaactacatcacactttgcctacaagtttttctggtgttttatcgcgcagcctcctagtttgccccaaatacctgaatccctccccaaaaattgcactggaaaaagaaagtcgcttgtatctagagtccagactcttaatgacatcgacaagaaaaaatactcttgattcaatccgatttttccttgaatcgaagagccgagcctcttgatttaggcggatttcctgttgattcaagcacaaagtccgattgaatcaatagtattctttcttgtcaaggttttaagaatctggacttttaaattcaagcgacttttttccagtgaggccttattttgacaggttcttgtattctttatcagcgcgatatctggatttatttgtcagcaatatctcttaccttccgagaaggctttctaacttatgtgttttgttttttgttggtctcatcagggaggagtgcctctgcccttcggccaagatggggacactcttccgaagcgaggaaatggccctgtgtcaactgtttatccagccggaagcctcatacacctccgtcgccactctcggagaggccggagttgtccagttcagagacgtaagtcattcactccattcctacatcactatactatcatcatttccagaactcagtaactcgacctggggttttaaggcgaaattccgctcaagtcgaaaatgcaggtgttgcatgtgtgagggatttgcgatttgaccattgattctcatgtagaagttcgcgaaaaacacgaaggtgccactggttttctctgaaatcatctcccaagctcaaaaaagctcttacgtaaagtgagcccaaaatggaggggatatcccacgctatcctgagagtccacgtctacatcaagacaaactctccatgcaaagatagggagcaaatacattgacagggctgccactttatttggggactcaaaaattgaaaacacggcagccctgttaatgtatttgctccctatcattgcatggagagtttgtcttgatgtagaggtggactctcaggatagcgtgggatatcccctccagtttggcctcaacttgagagctttttttagcttgagagatgatttcagagaaaaccagtggcaccatcgtgtttctcgcaaacttttatataaaaatcaatggtcaaatcgcaaatccctcacacatgcaacatctccatttcctcggttcctaaactagagtgtctacctgtccggaacttccgaaaaatccggaaatagtgctgattttttaagggcagtccggcagtgctgaaaaagcgtggaaattctgtaagaaggtccggaattttttccttcgtaccacgtatgacgccgaccccccgggaaagcgtctcgggaccgagtcacgccaagttcaaaaagcagaacagctcccagactcggatttcagtttattgaagggatgcagaaagctccagaacttcgatgccgtgttaccgaagcaggatgtctactcgtccggaatttctggaaagtctgggaatagaattgactttttaaaggcggtccggaaaaaccgaaaaagtgcggagattccgcaaggtccggaattttttccttcgtatcacgcgtgtttttttaatgaagtctggaaagtaatccccctgctcgttgattcttagagtagtatttgcctataagatcgcgattatgcaggcagttaatctccaagccaccaatgaaattttgtgtctgcttcattttcgtctcaatttgtcttcaatttcggtccgacgcgacaaacgcctgcgtggaacgcgtattggcgcctccaggacggcagggatacttcacgcattgcgcgcgagcaccgtggtgtacgcgcaatgcgtgaagtatccttgtcgtgtacgcgcaatgcgtgaagtatcctcgcagtcttgtaggcgctaatgctggccacaatgtgtttggctctaaaattcaaacccatagagtcagtgtttttcaactcatggttttggaatgtttgtactttctgtatggatcagtgtcatttaaaatgataaaaatattatgtacataaaatctagctaattccctctctttcgtcatagtacggttgcagatgtacaaaaaagtctacctgtgtagccattgtaaacaagtgtaagtgataccatcaagagagaagagcggtttgaatagaaagaaacgtttcacaaaaaggtttatgatgtatataatcttggattcttcaaagaaacttagacgtaagagccttaaaatctgtggcttttgtttttctctcgatgattcgttgaaagtaaagagatgaaatttgaatactcactctaaaaatttaaaattttaaattgataattgacaaattcggaaaagttacttaaaaaatcactcatcggcttcttgacatcgctcaactcgaatttctagcttattttgggctaactggtgaagcgattaaaacgaaaatccgcctaagtcggaatttctctcagttcgacttggcaaaatttccctttaatttacagtcggagaaacgcaaaataagtcacggataaatcaggaaagttcatagaattcgaaaatgagcaattagaaaaccctgatatagatccgttttgccgaacagtctaaaagcgagcaagagatcagaattatgtgctcaacctcaaataatggacttcgttctgtgctctcgtcgagtgaagttcaacgctgtcacgctcctccgagctttattagttttgagtggtttaaagtcatttctaaagttaagtttcatacctaacaagagctttacctctcatgaatgcgacattgacattgaatccgcaaactgctaaaggtatcgtgagatatttcctgttttgtgatacttaattgtcggatgttatgtaacttttttgattgagctgtcttcttatcaactagatcacaaacttaccagcgaaaagtggcaacagttcttgactgataacatctttgattggactgtgtgtcacccggatttcattactgatagtgagaattcttaacctacaaatggcagttaccagtatgtttacactcgccccttcttacctctaccaacacccatactgtcaataatcgagagacgcactgatcgactatggaatcaacaccgaatacagacaaggattcatcaacgactatccgcgttaaacaggatctgaaatgtacacacgaaataagcttcaatgattgcactacctgtaaaattaaatacgaaaagagcattcatgaaattatttgtaaccataggaattatgctttcacatgtgaaaaatgctatagacttcttgtagatgacgaaaacttacctctcttgattatttacagtaaagatttagaatttctgataaagatccgagaaaaaaatctctccctgttcaaagtaatctactatgattatgctgaagaactccctatggatcgcctccacttgtatctaataaataaaagtaaatcccaaaaaggtatagatatcaaatttaaattcagccataattttaaatgccaacacaatatattaatacatgaatgtaaaaattgtctcccaacaaagattaaagacctaaatgaaatctttaaaagtaaatgtttacataggatcacaatcccagaatgtaaccactgtaaaaacctattttatattcttaaaaaagaaaaagaagacacacaagctgacctcataaccgataaggactacatctctcttaaagattattacaatttatacccctcgaccagcaatcaaaagaaaaatacgccaaaacgtgacccctcgaccagcaatcaaaagaaaaatacgccaaaacttgaagctaacatgaaggaaaaaactaacaaaaaaatagacaatacaaaacaggtcaaaggaaatacaatacctacagacactacgaaaaatattaacccgaccaaaagggatttcaatgtcttaacatctgaagaaccaacgaaaactgaactaactgaagagaaaaagaaaaaaacagaagaaaagaataaagagaatataaattataaccaaataaataaaaatcctgtaacaaatataaaacaaccagaaataataactcaaaataatccagaacaaggaaacaaaaaacaaaattcaaataaaaataattctatgaaacccccacctatctacacaattaatgaggatgttgaaactttaaaaaaaaccttaaccgaacacggtattaaagaaactgtctttaaacaagcccctaataaacagataaaaatgctaattaaatcagaagatgtttataaagaaacaattaaaaaacttcatgaacttgaaataaaattttacacctttcaaccttttaacggcaaaactaccaaacgtttaattagagggttaccagtagactttggaatagaaaatattaaatataaacttgaagaacttatcagcgacctaaaaattaaaaatatcagacaaatctatcactcaaccactaaaacccctctacccttatttgaaataaactttaaactacaaggaaaaataattgaaactcttgaaaatgtcaaaaaacttgaaaattttgatatccaaataggaaaaatagacccaaaatatgtagatattccgatttgtaaatcttgcctaaattacggacacactaaaagatactgcttcgtaggtataacttgcataatttgtacaggacctcattttagtactgactgtcccaaatccttaatagccaaagaaaagaactcaaaaataacaccgacctgtctacattgcaaagaacctcacttttcaacatggaaaggttgtaaatattataaaaaattaagaaaagctaaactagaaaaattcaaaaaacaaactgaacccaacaacaataaaaataaagaacctagtaatgacaataccctaaaccaaaataaagaactcatagaaataaataataataataataaagagattcaaaccttaaaagaacaaataaaaaaattaaccgcattttatgtagaagaatttgcctatctaaataataaaatcacatctctcaaagaagaaatatatgaattaagaaattaataaacaataaattcggaatcactcacaactaatagtagcactttattttaggacttataacctaaccagtaagtcacaaaacctcttgtgattttgtagaagcttttaaagtattaatagcaagtaggataagtatcacatttaaaaatgattaagtagaccttgtcagtaaatttttatttacatttagtaaagttctgtctctcaacaagagtctcgtagcatacttaattgattttaagtaaactcagtagtatttagataggggaatttttctccaccattttttatggtggttttttaacctacacacatttatgaagtagaataaaataaatatcctagatattaagtagaaatctaaaagtaaagtagtattagcactgtaagtgacttattgttgtaaccgataaggtgggatgtaatgtcagaggacggttcccctccttttttgtaactcttttacaataaaaactttaaaaaaaaaaaaaaaaaaaaaaaaaaaaaaaaaaaacctcaaataatgccaactcttcttatttgagtatcagcgtgtggtaaatatagtgcactggtgacactgatatcgcatcacaataagtttttgataaagaatgcttcagaacggagaaaaagcttgtcctaaattctcacgtgacgagctgttctgaaccatttccgtagaaagttacgaagtacactttaatgctctcgcccttaaatactaaagataaattatcataacaacttgaagagtatttaacacgcagcaaaaaaacagcaaatgggtcgtttctaaggaggacaaaatattcgggcaagtagaatgtttaaaaaccgcaaaaaaatcatatataaggaggaaaatgacttttagtgttggaaatcaattcaaaccaatcatattttgccatactatggataaagtttaacttagagaaacataaatcgtgttttaaacttttattttgcataaatttcctccttttcaaagtcttaatccttaaagacgcttgtttaccatgcgctgtcggccatatagattaatctttcaaatgcatgggttggcagcggctcttttctagtgattttcgttttacacgttgtcgcccttttgggctcgaagagctacataaaccgaaatgtccatactctcacctggtacactcataaaaatcgcaaggtatagtgacccatcatatcaattcacgtgagtttatgagttggattgcattttgcaaaaaggaactactagcattgcaatgttgctgagattgtgcaactcttttgccttggaggaaaaacccgattatccatcaatagtttctattttactcgctaaaaaccgtgcttttaagacaaaaattaccatctaaatttcatagtttttcacgatttctgcaattttattgcaaaggatgaagttgcacaatcttagcatcattgcaatgatagtggttcctttttgcaaaatgcaatccagttgattcttggaattttcatcgcgttcgctgtattgcactggtgcgttcgacttttacctgagaaacaagtttaaggtgataaaattcgttccctgtcatgctgtcgatgttcacgttgattgaatatcccgtcgggcaggccctttcgaggttggcgcctatgagtgatttttttcaacgcccctgtgctctgcactcagacctcctccatgttctgacctcgtcaccgcgtgtcgacttgccagtagcccattttctcatattttgccggaattaagaaatgtcagccgctccttcacttaaaacaacagatttaatacctctattcgcctgttaaaaactttagacagaacaaaaataagagtgtactcagggttgccacagtcagggaaaactgggaaatgtcagggaattttaaaaagccagggaaaaccgggaaatgttagggaaaatgacgaaaatgccagggaaaatttattaaatcaccctcatttgctctctgtaatgagtttgaggtttcgattaacaaattttgcctgaaaactattttcaattatgccttcttaacaatccgtcacatcttcaattgtcagggaatttcaccgaaacgtgtcaaggaaatcagggaaatgtcagggaatttcatttttttgaattctgcggcaacccggattgaaggcatagaagagttctcacaaggtcagcaattttttcttcttttgtaaaatctgaaaattctaattcactaagtcgatgatccaccgagacgttaaatgtctgggggttttatggggaaatggcgaagcacaaaatcgacgatttctaacgttaaaccgggcaatttttgcccatgaaatcgaatatttttcctttgaacctaggaattttggctcgccaagtcgaagaatttctctgttaattaaaatccggcaatttcgaaattcgatctaacttgcaaccctgttagcctgtaagtgattttttcccccaacgacctgatgtaatccacggagaccacctcctcctccaagccctgacctcgacaccgtaagtcgacaggcccgtagcctttttgcttcgatttccccgccgctccgtcgcacagtggatctagccaatttgagaagtcggacatgaaatttttgactaaaactgcaaattttaatgtttatttcgtcacattttggggcgcgtagagaaggaaattactcgaagaaggcaatggaaccactttgagaacctcaaagtttgtataaacggagttttaagcgtttaaagtttgtccgagtttatcgacccctcattagagttccaataagaaacaaaatgtagtcccgtgtgcctttccgcgtaaattgatatttcggaacagcgggcccgcgccgcacagtggatcgagaggtcggacgtaaaatttgtggctaaaactggaaatttgaatgtttatttcgtctcattttaactttaaaggggtgcgtagataagaaaatttctcaaagcaacatcggaaaatttcagaattttaattgctcgctcaaatcgcggcaaaaatgacaaaaaactgtagagaaaattccggactttcttgcaaatttccgcacttttccagtacttccggatcgcccttgaaaaatcagtactacttcctgacttgtaggcaccttgggggtgattctagaagaaaatttcacgatgaaaccaatggaaccacttttagaacctcaaagttttgtataaacggagttacgagtgtttaaatttcttaaaatttgaatttctcgcccaaaacgcgacaaaaatgacaaaaaactgaaacaaattccggacctttttgcggatttccgcacttttccagcacttccggatcgccctcgaaaaatcagtactacctcctgacttgtaggcaccttgggggtgcttagggaagaaaatttcacgaggaaaccaatagaaccacttttacacggagaaaacaacttcgtgcgtgggacccgaagttgaggtcgcatggatctctgaagttttcggatcacgtatctaaaaacttgaggtcgagctgccgaagttcgggtcagacatttaaagtatttcgatatgtaccaaagggttcgggtcacacatctgaagtactccggtacataccgaagtgcctcgatgtctgacccgaacttcggcagctcgacctcaagttttcggatgcgtgatcagaaaacttcagagatccatatgacctcaactttgggtcccatgtacgaggtttttctctccgtgtagaacttcaaagttttgtacaaacggagttataagcgtttaaagtttccaaatttttccgacctctcatatcgactcggtccactgtgcgtcgcggcggtcgtcctgccgtcttgcgctcgtgtcgccgcggtctgcggaagcggtcaccggagtcccaagtcgatgtccgtggtcactagatatccaataattccgatagcctatggcccctccggtgatgggacgccggggcccagctcggcccatcctcataattcatagcaatagtcccactctccttgcttcttgcctcttggctcgctcgctccgtgcaggccgccggtcgacagttgttgccaggtctgagctagacctatatagatccgatagtggttcgatgtatcgtttggttcgaaacaatagaacataacctcaaacaaaaattctttcacactgaaaaaaatatagttctgttcacagggctcttgctcctgcacttcttttgtaacagtcacagaagctttcgttacgaggacagaatactctgttcccatgaccgaagttctgtcctcacaatagaaaaattctgtaagtgtaacaaagaaactgcatgagccctgcgaacagaaggttctgtcgtcatgcaccatctattttttttctatgcagggtgtcagcatcaggattttcccgattttcccgattctatacacggagaaaaaaagttcgtgcgtgggacccgaagtttaggtcatatggatctctgaagttttcggattgagcatctgaacactttaggtccagctgctgaggtttggatcacacatctgaaacttcagttcttacatctgaagtacttcggttttcacatccaaaaagcttcggttttcacatccgaaaaacttcggttctcacatctgaagaactggagtttcaggtgcgtgattcgaacctcgactgctagaccttaagtgttcagatgctcaatccgaaaacttcagagatccatatgacctaaacttcggttcccacgcacgaggtttttttcacgttggttccgtgcaccaggatttgaggcaaaatctgtcgtaaaatcaggatttgagaaaaatcgaccgtccgattcgaattttgtcatggagctatttttataaagttacattcgccttgcgtgaattcatgatttgatcagtacaggatttggaaaaattatgaaatcaggatttagtagtcaaaaattatgaaatcaggatttagcagtcaaaaatcaggaaaaatcaggatttccaaaactgaaaaaaaactagacaccctgttctacgatttaagtcggagaagctgaaaacgaggaaatggaccactagacaaggtacgaatttaagcaatctgatacatatttcttgaccagaatttcacgtagaatacgatttgcgcaacgaaaattactgaaaccaacttctaacaaagatattgacgttttcatttcacattgattacgaggaatttgaactgcccgctcacaagaaactcgaagttctacgtgagtcaaatcgcgcactacaacggtttcagcaagctgctcaattgagcaatgttcatttcccaccatgtgttgttcaaactataagctatttgtaatagatgagccaaagtgtcaagattaaggttgccagatttttatatcgcagagactgtcatgataacgtttagtgcgcgatgtgaatcacgtagagcatcgagttttcatgagcggatagtttgaattcacgcaccaagaatcattaaaaatcttcgtaaggagttgatatcggcaattttcggtgagcgcatcgtgttttacgtgaaattttggttaagaaacatgtatcagaatgctgaaattcgtaccttgtctagtggtccattccgaacaatttcactttccatggccattaagttttcataagaatcaaaaatccatcacaagaaacccgttccctcagataaatcaactaacttttgaggctcgctgggctggtcccttctgcgaaatagtctgcacaattttacccacctgctaagcgtgggcactaaactcttttccgtgcgcacttcaagatgagctgagctggtagcttagacacgcgtcccagaagtgtgacttaatagacgatttatgaggatgagtcggcaagaagcacttcagtctagtcattctgtacttaatttttgcggagttatcgccgatgaaaatttaaatgctgtgagtgacatcatccggtgtctgatgagagtatatgggcgccagcatgaaaagagcaccgagggaaagcgaggctctactctgccgtgatagcgaagagagcagtaagcagtggcgtggcgtgaatgggcctgttgcaaacttttgctagagcagaatgaagagttgtttcctatagataatgcctcaaaaatcacgatgagcgcatcggcaaagtctgaaatgcactcataacttcacaatctgcgtaagaaatttgcgttattttgagcttcccgcttcaaaaacgataccactgcacaggtgaacattttgttagaggagtcgctccatcgtcggcaatattcatcatggccgacgcttgcgcagttcctcgcgtaattcgaggagagttcaaggtcaattaaggcgggcgaggaaaatatgaacgtaaacacgccgattgttatatggtttaatcctgttcaagtgttatctcgtcccatcacacgtgttttggcggactggcgtcggccatgatgagtattgtcgccaatggaacgactcctctaacaaaatgttcacctgtaccgtagtatcgttttcgaagcgggaagctcaaaaaaccgcaaatttcttacgcagattgtgaagttatgagtgcatttcagactttgccgatgcgctcatcgtgatttttgaggcattatctgtaggaaacaagtcttagttttgctctagcaaaagtttgcaacaggcccattgcgatgtatcgattgttctgccttctaaacctatggcaaagaatcgattattaaagtgatcgctgcgaacaccctgtttatcgatccttttccgtaggtttaaatgacatgacaatcgatatatcgcaaagcacgccattccactggcaagtgcaaatatgaagtttttagaaaacgggctcagaaacgcctgatcggaaaattgtattcgaagaagcctccgttccccctttgttaaattgccgctaatggagatgctgcatgtgtgaggactttgcgatttgacagttgatctttgtgtaaaagctcgcgagaaacacgatggtgccactgtttttctctgaaatcatcacccaagctcaaaaaaagcgctcaagttgaggccaaaatggaggggatatcccacgctatcctgagagtccacctctacgtcaagacgaactctccatgcaaagatagggagcaaatacattgaaagggttgccgtgttttcagttttggagccccaaataaagtggcagccctgtcaatgtatttgctccctatctttgcatggagagtttgtcttggtgtagacacagactctcaggatagcgtgggatatcccctccattttggcctcaacttgagagctttttttgagcttgggagttgattttagagaaaaccagtggcaccatcgtgtttctcgcgaacttttacgtaagaatcaacagtcaaatcgcaaaatcctccaacgtgtaacatctccatcgccgctaatcatccgaaagactcttagaaaccgtttggatgattaaaaatcgaccgattgtatttcaagtacataaaaaaggaatttttcgacagtcgtgagtgatatctcctgcatgctttcgtggttgcgtctttggacacacaacaaaataaaatttcaggtcagaaataggcaaaagagggcggcactttacttgaaagcactgttttcattggctctctagaggaataaagtcacttacagctgttttgactgaatctacgtcatttttttgcgcactcgcaactttcccatatgtctcgttttgatacaatcaagatgaatttcgctgtctcagctatttcagcgatttcatctaaaagagatcagacgaattttaaaggagactcgatttcggaaatttgacacttactgttctcttcgctatcacggcagtactctactgtgctaaggaagaacgccgtatgaacattcgagagttgccaaatttccgtcgataaaatgtttatttttaaggaaagttgtgaatattttcccttttaattttcaggaactttatgtgaaattgaaaacaaaattatctaaaaaaattggaagaaaaatacacatcagttttccaagaaatttatgtattatcaaaggtaatttggcaacgcctgaagatcataccgcgtttttccttagcacggcagttcggcagtattgtgagctagcatatgcttttttgccgtcgattcttccttgttttgtgtatgaacataggtcaaaaaaataaatgaacgtatccaaacaaaaactatagccattgtgacacgagtcctatcttgcttgcactcttatggatctcaaagctcatgccagaatggatatagttccttttgacttataagtagaagtttatcgacctctgattcgagttccgagaagaaagctggagtcctgtgtgcgtttctgcgtaaattgatatatcggaacagcgggcccacggagcctcgatgtaaaaattgccgagcagaggaaaaacatcgcatgagcactcaaaacgttgccaaacttttccttgataaaatgtttatttttcagaaaagtcacgaatatatttcctcgaagtacaaccttatttttgggtgtaaccagataaagtctcatggaatttttcgttagaaatgcccaattgttttccagtacatgaaaatataattctcgagtgcactggaaaaaaaaaaaacactttgaatctagagtccagactcatgaaaacattgacaagaaaaaatactcttgattcaatcggacttttgcttgaatcaaaacgaaatcttcttaaattaagaggctttgttcttgatttaagctagattctgattgaatcaagagaaccttttcttgtcaatatttttaagagtctggactctagatccaatgtgtttttttttttgccagtgtgggcagcgttaaaattagtcacgttccggtccgtcgtctggaaaaagacgaaatttgacgaacagtcgaatgttgatacgctatttttcctccacacagaaactttagttcccccgccgcgttcgccgcacagtgagacgccccttgaaaagaaggtcgaacatgataattttgacttaaaactcgttccactgtgtattgttgtcgtgcctggggattgcgggattatcctgggagctaataacatcgcccctctgacgctagggcgatctcaattcccaggtgagccctggattacctataaatccatgttctccggggctcttgaggaattcgagatgcgcccttaatcccgagcagcgacggtaatgaagtcaatcagaatacgggagtagcccgggcccgggcgagcgggctcgtcgcacagtggatcgagtcaattagagaggtcagaaattaaatttttgacttaaacagcaaatgttgatgtccatctcgtcacattttattcaatgggtgcttttagaagacatttttacgaggaaactaatggacccattttgagaacctcataattttatgtaaacggagtcagggttgccacagtcacactgaaaaaaaaaaaaacacattggatctagagtccagactgttgaaaacattgacaagaaaaaatactcttgattcaatcggatttttgcttgaatcaaaacgaaatccgcgtaaattaagaggcttggttcttgatttaagctatagattctgattgaatcaagagtactttttcttgttgatgttttcaagagtctggactctagatccaatgtgtttttttgtccagtgtaaaaagtcaggaaataattaacaagtaaccttaatttgctttctagacaaggtctgacgtttcaaacagattttgagtgaaaactattttaaaatatgtctttctaaccatctagcatatcttcaattttcagggaattttaccaaaacgtgacagggagatcagggaaatgtcagggaatttcaatttcttcattctatggtaaccctgtttttaaagtttttaaagcttttaaagtttctaaattttctccgacttctcctattgactcgatccacttagagtccctttatactgagagtcaagacaatgtgaatccatttctgattggttcccgtattttaggccttcacagtgtcaaaaacgggaataaagattacattttcaccgattgcaaagattataaactggaatggaccgggacattgggggtacggcaaggaacaaatggaatgagagaaggaacggagaaaggaatttgagatcgggccgatcaaagattacaaaaaacgttcaatttgtgtaatctttattaccgtttgtgactccatgagggggtgctgtcttgactctcagtatgaagggattctagattcactgtgcggcagttgggcacgcaacgcagcgccatcgatctgatcgtaagtgaatcgaatcaacttgttaataagtaaacaaaaagaacccccggttccctgctccccggcggaggagcttgtaaatgtcaatgccgaggccagcccggcccgggtggagtcgcgtttctcccgattttccggagacgggaaaagcgtccgggccgagtcacgccaagttctaacagctgaaaagttcccggatttcagtcgattgaacgggtgcagaatgttccagaactccagtgaaaactcgcgtagtcgaactgtagttttaaggcgaaatgccgctcttaaatcgacaattttctcggttcctagaataggggtctattattccggaaatagcactgattttgtaagggcgatccggaagtactgaaaaagtgcggaaattccgcaagaaggtccggaatttttctttcataccacgtgtgacggtggccgcccagaaaagcgtctccaacagctgaaaaattcccagactcggatttcagtcgatcgaacgggtgtagaatgttccagaattcagtgaaaactcgccaagtcgaactgcggttctaaggcaaaatcccgctttagtctactagtccggaattccctgaaagtctggaaatagtgctgattttgttagggcgatccggaagcactgaagaactactcaaattctgcaagaagatccggaattttttccttcataccacgcgtggcgccggccgcccggaaaagcgttttgagaccgcgtcacgccaagttccaacagctgaaaagttcccagactcggatttcagtcgattgaaggggtgcagaatgttccagaactccagtgaaaactcgcgtagtctaactgtagttctatggcgaaataccgcttaaatcgaaaatgttttcggtccctagactagcgtgtctattagtccggaatttctggaaagtctggaaatagtactgatttttaagggcgatccggaagtactgaagaagtacgtaaattctgcaagaagatccggaatattttccttcataccacgcgtggcgccggccgcccggagaagcgttttgaggccgcgttacgccaagttccaacagctgaaaagttcccagactcggatttcagtcgaagttatccactccactcctacatcagaataataacatcattcttacagtgaaaactcgccaagtggaactgcagttttaaggcgaaatcccggttaagtcgaaaattctctcggcccctagactagggtgtccactagtccggaatttctggatagtccggaaatagcactgattttgaaaggacggtccggaagtactggaaaagtgcgaaaattccccgaccggaaaagcgtctcagggctgagtcacgccaagttccaacagctgaaaagttccctaactcggatttcggtcgatcgaagggggtgcagaaagttccagaacttcgatgccgtgttatcgagacacgaaaaatcgtcggaatttctggaaaatctggaactagcgctgatttttttaaaggcggtccggaagtactggaaaagcgcggtaattccacaagaaaatccggaatgtttcccttcatactccgcgtgttttttaataaagcctgaaaagcatccaatcccctgcgagttgattcttaaagtagtatctgtccgtaagatcgttattgtgcagtcagataatcttcaagccaccaatgaaattttgtgtctgcttcatttttgtctcaatgcggtctcagttttgtctcaatttgtctccaatttcggtccgacgcgacgacgcctgcgtggaacgtgtattggcgcctccaagacggcagggatacttcacgcattgcgcgaaacgcaccgtggcgtacgtgcagtgcgtgaagtattcttttcgtgtacgcgcaatgcgtgaagtatcctcgcagtcttgtaggcggtaatgttggccacaatgtgtttggctcttttcaaacccgcagagtcagtgtttttcaactcatgggtttggaatgtttgtacttcgaggagcttcaatgtgtaacatttccaaaaatttcatcgaattttgtgaaatttgaggatttcaagtgaaaaatgaggtacttccttgacaactgcatggatcatcgtcatttaaaatgatacaactattatgtactttaaatctagctaatttcttctcgttcctcatggtacggttgcagatgttagcaaaagtctacttgtgcagccaatgtaaacaaattgaaacgatacaccattctcttcattttgccttgtagaatcctattttcgaactaaaaagttctgcatatttttttttttaaatttccagagattttagattgaattggcgtacaaaaatgtctgcaaaattggaaggaaagtatttaccaatgcccttataaactacactgggaaaaaaaaaacacattggatctagagtccagactcttggaaacattgacaagaagaaaaactcttgattcaatcagatttttgcttaaatcaaaaggaaatccgctcaaattcagaggcttggtccttgatttaagcaaaaatccgatcgaatcaagagtattttttcttgtcgatgtttttaagagtctgaactctagatccaatgtgttttttttccagtgtagtattcaatcgaagaaaatttggcaacgtctaaagtttcttaccgcgtttttcctcagctcggctgaggaatactcccgaatccagcagattccagcactcatcacccgatgcgcaatagctgtgggtataaatgaacggggtcgcacaggttattataatcggagccataattagtgaacatgaccaacattttggcgataggcgcgcccgcgtatggcggaccctcttatcaattatccagtagccgatggccgacgcacaaaggatctagtcgatatctggagaggtcggacaaaatttggaaactttaaactccgtttatacacatttttgaggttctaaaagtggctccattggtttcctcgtgaaatattcctccaaaagcacgccgtgaaatttaaaatgcgacgaaataaacaccaaaattctcagcttcagtcaaaaatttcatgtccgacctctctaatcagggttgccacagccagggaaaaccaggaaatgtcagggaaaaccggggaatgtcagggaagtttaaaaagttatggaaaacagggaaatgtcaggggaaatgacgaaaatgtcagggaaaatttgttaaattaccttcatttgctttctagaatgggtttgaggtttcgaacaacaaattccgcctgaaaactatttgcaattacgtcttcttaaccacccgtcacatcttcaattgtcagggaattacaccgaaatgtgtctgggaaatcagggaaattgtcaggtaatttcattttctaaattctgtggcaaccctgcataactctgttcatacaaaatgttacgccttcttaaccacccgtcacatcttcaattgtcacggaattacaccaaaatgtgtctgggaaatcagggaaattgtcagggaatttcattttctaaattctgtgataaccctgcataactccgtttatacaaaatgttgaggttccaaaagtggctccattggtccctccgtgaaattttcctccagaagctccccttaaaatttaaaatgtgacgaaataaacaccgaaatgcccagttttagtcaaaaatttcatgtccgacctctccaattcactcgatccactgtacgacgggacggtcgcgtggcccgcccgttgaccttgccgcgtcgcatttgcgttgcggggataataaaggagtgttttaatcacgagtgtgcttaattgatttatgcacgaattggcaacgtcgagggtcgtgtaatgccccgatggcgtcgggtcgccgctcctgatcgcggtcgttgcggcgccgctaggattatcctggatgacgtcacgggtttccatcaggattgccaaattgcctgggtgagaatagggtaaaaagttgttgaaaaaaccaagggaagtcaagacattttgcacaaccctgaaaaatcgttgttcctctggcgcacagtggagcgaatcaatggcagaggtcggatatgatttaaaaactttaaaagcgtatatcttcgggtgccatcagggtgcgccacttgcgcacatgaaacgccttcagagagtcgagtatgtaatgagctaaactcagcacacacaacatattcgtaccaacaattgctgcgtaagcacctgaaggcgaattgaaaacaaccgaataaaacacattgaaaaacattttagctcttttcttaattcaccccatttaaatgtatgtaaaacattttattcttggtgaggcagcttgcttcacccacaatcgatattttgaatggatttaaacggagggaaaatattgatgccaactttcaagcatcgccactgatctgatcctttgacgtttcaggaattttgatcataatacttcccgactttttaatgttctgcggggcgacatgattttttatgaaaatatgctgttcgcagacgttttcggcgcaaagtatcttgaaattaaaagtataattaaatgtattggcctgaagagagagtttaaagatatttcacagcaaagtacactgacttttctctcatttcgtcgcacctctaacgcaaaacgcaagggattatcttaatttccatgtgaaccctgtattacttataaatccaggttttcacaggctcatgcggtaaccgagatcagtggcgtggcgtggtttgcgatatatcgattgatctgtcatttaaacctatggaaaagaatcgataaacagggtgttcgtaaggaacacctcacatatcgattctttaccatagcttcaaatggggaaatatcgataatcgatcgttcacgccacgccactgaccgagaaaccgacggtgaaactaccaaaccacgtatctcggtttgcgacgtcgcagacttcctgtcatactttattttttcaatgaaaaactacttaacatccaatcttgaaaatttctgtgatttttcctctttgtgcggagaaaattccgtgaaaatttcaaggaatgatattgatttggtctacttcaaaaaaataaaatgtgagcgtagatttttaaacaccgcaaacgagatacgtggtttggtagtttcaccgtcgatacgctcttacgccactcagtggaacgagtctttggaagaagtcggacatgaaatttttgaaaaaaaagtttcaaattttatgttcatctcgtcacgattttaattttaaggggtcgctttgaatagaaaagtttacgagaaaaccgataaaactactttcaagacatcgaaatttcatattcacgaagatgtacgcttttaaagttttcaaatcatgcccgacctctgccatttcccttatctcgagcgtttctagcaaagtttaattgtaagcgcgtgcctcatactcgacggctgtaaatctcaacgcattcgcgcggcatcatcttcattctcgtcggcttttgttcgtcagtgcgccacgcccggtgacccgctaccgaactgcagaagaacgccgtatgagcagtcgaatgttgtcagatttcccctgacaatatgggttaatttcaaggaaagttatgtgtttttcccctgaaaatttttagaatcgtcagatttagtccggaatgaaattcactgaacatctcaatgcagaacactcgtaattttacgagaaaatttacatttcattaaaataaattcgtcaacgcctttacgctcttacgcggtttttcgtagctcggtagcggctgccgttgacaagtcccgcgggttcaacgtgacagatgaatagaatgaatgcatttatgctaaaagaaactatgttcaaatgaaataaatcaaaaggaactatcaagcacgcaaattctatgtgtgcatcgttctttttgaaatgaatccgttcagataagaggatgagagaccaggtcgcccacccgctgggatgcaatgattcatctagcggattcaatgcgtgtcacagccccacagcctcctcaatcatttgttgaacggtttgtttgaaaaagagcgtaaacgtcgtagaaatcgcatggctccacgttctttttaaaggagccgttttgttgccgattttggtttcggttgcgcaaaacatgccaccaactcgaacatggcgcctcctcattcctcgaccattgtggaattcaggtctgtggaactaggtttgctgaaagtgtccaaagtccgtaggacgctttaatttttcccccttttttttctaagcaactgacctgtctaaaacctcagcaagagcaaaaagatgagttctctcatcaaatcaacttaatcctttctttgttcgcactccagcagattgcggtacttttgcaaaatacgtcttctgagagtcgagtatgtaatgagctaaaatcagcacccacaacatgttcgtaacaacaattgcttcatatgcagctggcgcattgctttcgcacatgaaatgccttcagagggtcgagtatgtaggtaatgagctgaaatcggtacgtacaacagattcgcaacgacaattgttgccgacgcagctgaaggcgaattgaaaacaaccatttaatgcacgttgaaaaacatgttagttctttaattaaaattgttatcaatagagagtcgtattgcttagtcagttagtgctttagtctcgtgacaacagaattgcgatctcaaaattggagaaaaattacgagtagctaaaaaaatggaacccattgatgcgatatatcgcatgccgctctgacacaaaatatggcgtccgtcgaatcaccttaagatgaattttgctgttttagctaattcagtgatgtcatctaaaaaatatcagacgaatttcgtaggaaactcgatttcgaaaatttgacacttcctgctcttttcgctatcacaacagtataggctctctagtgaacactgaacaaatggatattcgttaaaatcagttaaaatattcgggcgcattgtttcttttaaagctcaacagctatcgaggaggtactcggagtgagtttgcggtgactggactacagagtgcgctgcttgcttgttgtttcagctgaacgcgggcgtgaactcctttcagcggaagttcgtgagcgaggtgcggcgctgcgacgagatggagcggaagctgcggtacatcgaggtcgaggtcagcaaggatcgcatcttcgtgcccgagtccaacgtctgcccgcccgcccccaacgcccgcgagatcactcaactcgaggtaaaccaacttccattcagtcgctcatcccctatcatccgggggctatttttcccactatccaatatgaaaaaaaaagaaaaactccggccttgaaagccgtatctacgagcttaatatacatgccgttcgcgtttcgggctcagaggccgaaagttcggggtgctggaaccgtagcttcggttgctccggttgctgtgcccggaactttcggcctctgagcccgaaacgcaaacggcatgtatattaaacccgtagatacggcttccaaggccggaggtttttttttcggcctctgaggccgaaagttccgggcatagcactcggagaaaccgaagctacggctccagcacccctaactttcggcctctgagcccggaacgaacggtatgtctttatagcccatagctttttttttcagtgaaagggacgtcatttggagagaggggggcaatgctcttcctcttcgcaatttttgcaaattttgatgaattttaaggaaattctgaagacttccatgccgctcccccccccccccccccccccccntactaaactttgcctcctcagcgtcgggagaatgaacatacaactgacaggtttttttttacagtttattgaaatcctggaaaagtctggaaatcttgcccaaccctgaaaacctagagaagtatcctgtgtgaccatggaattctttctttaggctgaaatgtttacttattttcagtcataagacactaacttcatgataaaaatgttttgtgaaaagcatattttcgctagtaattatgtcataaataacaccgaaaagtcatgggaaaggcaggaacttatatgctcaaaccccctgaaaagtcaaggaaaaatcagggaattttatgattcaagaaaacttgtcattctgaacaaatctttccaagactcagccgaaaagacgtacctgcctttggctgtccacaaatgaaatgtgatgaggtcaagagagagccactcagttgaggttttgataaaatgagatgacaaaaagcttaggtgggttcattctgtaatctttagtgcaaagaaccccacaatgattctgaaaattggctcttcggtagtatgtcaaagttgaagaacaataaatcgtgattttgaagggggggggggggggggacaaattaagttagcctggggtgtcatcagattcaggaacgatcaatcttcataaatgtaatatcatcactcccatgtcaaaatttaatttttttagtgaagaagggcatgtttttcttagtgtaagatttggaccgcatctattgaaaaccatgacctaacattgtcatgcatgctatctttaatgtattcgctgctcacaaaattagttttaacgatatttttttcttattttcagtcacatttagagaggacggaaagtgaaatccttgaactcagtcacaacgctgtaaatttaaaatcaaattatctagaattgacagaactgaagtatgtgttggaaaaagcgcacgcattttttcaagaggtatgtattgattcccatccacctcctgtctttgttgcacattaattttctctctcaccaatcgctgaatgttctggagcttggctcgttttggtgttccttgttgcacctctcttgcagtgttgaatctttaactgttttgatggcgctccgatgagctgtccagtcgtgaattccaaaacttcgtcaatgctcctaaaagttggagagaggttgtttttccgtgcaagaaaaaattgaatctataggcagaaaagtgcagaaagtatcttcccttaaactcacaaaaaaaagattagaagaggtaatataggaatgtctcagtcagggaatacctagaaatattagggaaaatgatgaaagtatcagggaaaatttttcaattcacctttatttcctttccagaatggatttgacgtctggaaaaaaaatttgacgcgaataatattttgaattatgtcttcctaaacatcttccatatctgtaattgtcaggaaattttactcaaatgtgtcaggaaaatcagggaaatgtcagggattttcattttctaattttcgtgacacctctgtaatactttctaggaaagtcagcaaaaatctaagaaagtcatgcaatttcatgtaacatctcagggaaaagttagtaattaataccaataggtgaaagggaggaagataggtaatactctgagatactgggagtgagtgaaagtataagtttatttggaaaatatacaagtgagacgttgagcatcatgcatgacattgacataaacataaacacaaaacaagggaaacattcgacccaaagtttaacaattgaaccttggattttcatatcctttttaaacttttaaatagtcccagttttacagttttaagcgctctatttctacagctcaagttttaaatcagatgtgacttgtgaaaagcatttatatgcccgttctgtttggaaattatgtcaggaaattttgaaattaagaaaacatgttaccctgtagataaatcgttaattatatttcccagtttatgccttgtttcactggagatattgtgctctaatatccatctagtaggtaactaagaaacaaggaaaaaggtaattcactacataattcatcaaatattttcatagccaaaaagctttgttcatattcaggagcgtgcagtaatagtataactgaaaatgtaaatggtaaagttagtaagatagtctgattaaaagttctgtgcaggtgaaagaggaattcgaagtttgacctgaggcagcttatgcttattcagtaacttaacaaagaaaatttcagctccaaaatttgcttttttttctgtcctggcctacttcaatcattcacagttttatcttctatcgttttgtgtagcactacggcattccccaagaaggcagttgatgtaaataatatgatgtgtgtatgttcctccctccttcatttttgcttcaaatctgatcgagtaatttcccaaaaataatagcttaaaaaaccggcgaaaagaagtggatggcaatcaaatgtttttggagctggagaaaatgagctattgccatgtataccagttttaccggccatgcagtccaaaagatagaatactctaactaagagctgaaacagttctgattgaatcaatagaatcgagcaacagcaagatttttggggtttattggtattattaaacattatacagtgatagcttatcgacaaggattcgtttgaacaaccctaggtgaatgaagggggaaaaatacaccatgtgctaagacttcaatgaggaaagttacgagaaatgtgagtatgtcttggttgcaaattgcatcaggcccttgaaatgccctttgaagagaaaaatgactaagatgtacaaattaaatcatagcagaataattttataaagttttgtcttttttgagcttgacttggatattctggatgtaagtaaagaattgatgatcttgtttttttttttcaaccgtcacttttgagagtttttccttactacacagttacgaagggtttgttcaatttctttcatactgggagttggagcttttatcacttattgaaaagaaactttgatcgtgaaaactatagcagtggtgatccatattatatgaaattttaactatagctataaccagtagcattggtgtatttcaactgaaaacgaacaaaaaccatgaacaagccctctcgtatttttttttttttttttcttgattttgctacatacctatagcgtgcatttttctttctgggtccaaagactgacatgataagggtaaaattagaatattttatagagctatttaaagctgttgataagagtaatgcatggccttttttcctaaattcatttgaaaaggattggaaaaagataacaatagtttaaagggattcctgcatacttttttgagcaatgcactcactattagtcgctacaggtcttgctgcaaatctttagctgccgtatttgaatggtgatctttgcttcaaggtgccctctgaaaatgacattccgtacctattcatcgaaaaatgctgaacttagtcgggtttcgcaacatcaataagcctccaaagttgtttttttccttactctcctagggtgtctaccagtccccaaaagtccccaatgtccccgattatcgccgattttggaaggacgtccccaaaagtgcccaattttcttgttcaggtccccaaaaaatgacaaaaatcgtcctaaacactggcattttcaatgtttctcgccagccgcggtgcccggtataaccaggaatagaaatgactgaagtgttgcttggttttttgtgttttcatcggttcaacatgacttttaaaatgaggtgtatataatacgccttttaacgctctaactagctccatttttcttactgtttcgggggaaaagtcccaaattttcttgatttacacctctaaaagtctccaaaagtccccaattttggttttttattactagtagacaccctgtctctgtccattctctcgtctcttctttttttccctcaatggaccactagacggagtacaaaattgagaaccgccgcataatgtttcttcatcgaaattttacgcagaatacaatgaaaccattaaagttttccaaatgtacctaataagttggaataagacggtttttgtccgctttaattaacttttcctgctcactgaaaaaccagagtctactcgagttaaatggactaatttctgccaaacggaactttgtgcattatgacgtgagccgtgttatgcatatattcttataggtctcagggctcatgtcttcatacacatagttccgtttggcagaaatacgtccaaatctaagtgtcaatcgagcttaaagctaactttggtattggtattttaaaatggaagaattttccaggatactaaatttttgtgttgacgaaattaaagataccttgtattaacagaggaaagctatgcaagtgaaaccaagttttagttattatcctattaaataaattgatttcagtgcctaattatgcccatgttgatcatggcttccgtaagcgggaagtttgaattgactttatactgtaatccttgaacgttatgagttaatcttgaaagttcttgatgtttttaacatgctctgcgggaaacttcaatgagaaatcatgggctgttgtacatacttttttaccctgcagagtggctcattactaaaatttggtaacggagaactttagtgggttaaaatattttgaatcgtcaattccatttttcgtaaaacttgaaagaaagtataatgctctgaaaactctgttgctgtttattatagcattactgcatgttctagagttttaaattgttgaacattctcctcttcatttaattgaattaatggaaacagttcattttaattaatttttttagaatgactaggtgacaaaaaatctttcaataaagaaatcacattctgatgcgttgaaaaatccctctgcaaaagtcccttgcatgcctgaataagtttttcttttgacaaaaactgtatttcttagttcttacgatggctcaaatgcagtagtttcaccttcagtattatgttacacagcgaaagtgtttttgttcacaccgatttttgcttgtttgacttttgattttatggttttagctgcttgtagttttgtttggcattgtagtttgcactcttctctcgtgttgtttctcagagtttctgtttaaaacagcaagagggcgccagtggctcgggcaacaacgactcgctcacgaaagcactcatcagcgatgaaagccagcagcagtcctctcgcggtagattagggtaaggatcctcttttaactgtgcctctttttttaaatctggaggtcaatacctttttccattgatttactctctcttggagaagacatgctgcttccatcctctgtctgtcacgttaaactcacactcacaattaaatttgtctgggaaaagagatttaacatgtgttataggtattttatgcatattaaaatgaaataagtttatctacgccggaagttttaaggaggatgcagtaatttaagactgcactcgctcacatcgaaaagcaaaactagtcatgagttttaatccctccttcagatactttccttttgtgcaacgttgcatttttttgaaacaagtcaatctctattgacactgaaaaagctaccacacaaatttcagatgacagcatcgtcagcttgaatgtatttcttaacagagttatcaattttttcagacacacgccccatgaaagtttccaacctcaatgtatccttccttaactttttagagccaagacagtgaggttgctcttcagtaaaaacattgaaatttgtattttatcaatgccaagagcactatgagttgcttttgttccaagagttttttttatctttattatttaaattatttgaagaattttggcatcatacataagttcgaattttgttcaccaattatgtttcatgttttttttcttctttttttatgtattgtcgcatcttggtatcctctacttcactttaaatgtcttcattttagtgttaatttcgttttggtctcttcaaacctagatgtttctctagaacattttttccaacaactttttttgcgaatttcatttttaaaaagaaaaaaaacttttcggagacattttcattgcttcatgcttgtgaaaagcatagtctcaagattgacaaattctcaagagcaaaactgactgtaggaaagttgaagcaaaccattattcctgcatttgttattctaagttttcttagacaagaaccatatcggcaatgtaagtcaacaatcacataacttggtttgcgacgtcgccgacttcctgtcatactttattttttaaacgaaaaacaactcaacagcaatactttcaaactgccttgattttttttctctgtgcaaaggaaattttgcataaacttcaaggaatgatgtcaatttgttctcctttaaaagcataacatagaggcggagattttcagacaccacaaatgagatatgtgattgcggacttactccgtcgatatgctgccaatgtccaagcagcactcagttttcagcatacaccattcacggatggatgctgcccctgaagcgtgtcctaggaaagtccaacttctctctatttttacaagaatgctaaaactttaggcccagcattatttattccctttctgaatccaaactggaacatgcatcttacagttaatgtagcaaattctctttaatcatctgagagggacaataagttttttccgcatgtactcggtgagtaatggaagatttttttgtctgatggtaggtttgtcgctggagttgtgccgcgggaaagagtgccagcgtttgagagaatgttgtggcgaatcagtcgcggaaatgtattcctgagacaagcagaattagaggaaccattggaagaccctgctacggtaagattgaaagaccctagctttgaggaccttagctgtttctcaaatctgtcctaaagttaagaatcttagaggcaaaactgaaaggaaattacccaaatcagacaaaggagttgcccaataaggatagcaacaggggatttcaaataaaacgagggagtaccaactccctgacgagttatgggatgacagggcactgtggcagttgggtgttgcggagtgccagagactgctgcatcagcagctcttatgtatggttggttggtagatacgcttatttggtgcttttaacaatcgagccattaacaccttagaggagagattaaaatgtatgtatgtatgtacgtaattagtcattcattaatttatggctcatcagtgaaacaattgaattagttcaattaactcacccagaagctgaaaatgaggttatgctctatcattttgtcttgaacaattgccgatcaattatccaatttatcgcaaatcagtatcctcactattctattaaaatcatttttaagacgctcgacagacgggttgaggaaggggagtaagacggtcaatgggcaggagtgaggaaggccagagtcttaatagaatgggtctttactttcagagcctttattgtttagtcatggacagttgtatgtggccctgtcaaggtcgacttccaaagaaggaatcaaaattcagagtaggaagaaagtcatcaagaatattgttaggcgggaaatttttctttgaaacatcgttttgttattcaattaaaattatttgctcatttactgtaagcgggcgatttcgacaaaaatgctggccgcagagcggcttttgggggtgcccagcgctcctggggctgtgccccgtagtgttggatattgcaagaatgatatagccactaaatcagtctatacttcaaagtatcagttatttgggggagggggggattcttctttcattcatagtagacaagatgtgaaattttctatggtgatcgtttatctttgcaggggaacgaaatttacaagactgtttttgtagctttcttccaaggagagcagttgaaacatcgagtaaaaaaagtatgctcaggattccatgcatcattctaccaatgtcctagctcgcacacacaaagacaagaactgctaaagggcataaaaacaagattagctgatcttaatttagtaagtagtttttggtcagtataatccctaaataaggctaaaaaaaataaggaatgttccaaatgacacgatttaaggatcgctgtacttgaaaataactcaaacttagtgcttttatttcttaatgtgtacatgtgtgtcaagaagctgcttgccttccctcttcacctaaaagttttatgaaaagttctaattctgttttttagagtgcttatttttacctatttggtccctcaaactgtgctgtccagttatttcaatttctctgaaaccgaatttttacttctaagagttagctatccgaagccaaaatattcttcttctttttttatatttgtttttttgtatgttttgaaaaatatttaaaccgtacagagcatatttttcccaaccgaaaatcatgcaataagtcaatttcattggatgagcaaatgctcaaaattttgtagttcaccagagacaaaattctgcctttaactagaagtgtgtaattatggattttaagttttgatgaaagtaaaagttaatgtaagctcttgggcataatgtaaccatatgatcgtaactggagaaatatcgaccgctcaaaaaggatggaacgtgtgccttactcatcatgcaagtgctgataaatagtacactctatcagaactatcacactctatcagaactatcacactctatcacactatctataacactctatcacactatctataacactctatcactctctttcagaactaatgtctagtgtcgtgaggaattcgcttgtcagcacatacagggtgtcccaaaagtcccttccaccccctctaaaattttacctaattaatattttggaacgaaattttggggatgttcatcgatcaatgttagctacttttgaggcccccccgtggggaggggctacggaccccaacttttttttttcaaatagcaacccctatcttgtgacacctcattcaaaagagcataaaaaactaagaattttggcgcaaaccgcagatcaatatcttaacttttgaccgagttatgataggtcaaaggtcaaattggacctattttcaaaaaatcataactccgggtcaaattatcgtaatgaaaaaaataaaacgggaaaatttaccaaattgtaagcactttcaagtaaaaatcacagaaattacttcaaactaattttaaggggggcttcggaccctcaaatacgtccattcaaaggttattcaattttcccgcggaataagccaatttcccccagatttgcctccacattatctcagtaaggtcaaagtcagttcaacattacgttggcaagtcctcaaatttcgggaaaagtttaaaaaaacgaaatttaaacggtcaaatttaatcaccttaaatttcgtttttttaaacttctctcgaaaatttaaggtgattaaatttgaccgtttaaatttcgtttttttaaacttttcccgaaatttgaggacttgccaacgtaatgttgaactgactttgaccttactgagataatgtggaggcaaatctgggggaaattggcttattccgcgggaaaattgaataacctttgaatggacgtatttgagggtccgaagccccccttaaaattagtttgaagtaatttctgtgatttttacttgaaagtgcttacaatttggtaaattttcccgttttatttttttcattacgataatttgacccggagttatgattttttgaaaataggtccaatttgacctttgacctatcataactcggtcaaaagttaagatattgatctgcggtttgcgccaaaattcttagttttttatgctcttttgaatgaggtatcacaagataggggttgctatttgaaaaaaaaaagttggggtccgtagcccctccccacgggggggcccgaaaattttggggggccccaaaagtagctaacattgatcgatgaacatccccaaagtttcgtttcaaaatattaattaggtaaaattttagagggggtggaagggacttttgggacaccctgtatgtgtccaagataccgaattaccacttcacttcacattatactgaaatgttagatgcatttaattattattccaactctccaattgtaggtattaaaccaaacacgagatcacaagcaaactgtgttacgcagtgtagcggagaagcttcatggttggacagtgcaagtccggaagatgaaagcaatctatcacaccttaaacttattcaacatggacgtaacaaaaaaatgcctcattggagagtgttgggtgcccgtcaatgatttaaccttcattcgcaaaactcttttagatggtagtgtaagtatcaaaacctttcatgccagctctatcaatttctttagatgcaatgtgcgctgctttaattttctttaacccatttgcatactagtatttttttgcctgttgcgcttagtggcataagtaaccaagagggcaactaaataccctttaatgattggtagaacaatatccataaagttatctatcaggcagtcagacgaacatgaccaaaacaatggcctattgaccctgcaagttaactggtctattcacaattgtctaacaatgtcacatttgtcacattgtctattgtggtaacgatggcaacggggtaactatgtatgcagataattgttgaacaaccatgcaagtcagatcatctaagcactgatatcccaggacagcgtcaaatatctattaaatagataattggcaaaagatttgactttttcttgaaaaaagttagcacatttgatgtatagatctttcaaataaatttttaacaggtcatttttttttgtcatatcaattgtttcctcttttttttttgtaatcatgaacaaaaatgtcgatgaaatttaaatgaatagaatctaaatgtgtattagctataaatcatgaggtgattgcacaagattttattgcttttaaaatcagagattactattattaaaaaaatgaagcaaacttgtaaaacagagctatttcctctttttcaaattcggaatcttattttgccaaatgaagctcgattgagaagacaagacacagagaagactcaagcaaagtactgattgttgtcagatctctctaatcaagaagcccagtattctcccttcaagttctaaaatgagaaatggtcttgctatttttcttttattgaatttgagcatgttattttgtttcagaaagctgtaggcagttcaattccatcatttctaaatgtaattgagacgaacgaaaatcctccaacatttcaccgcacgaataaatttaccgagggctttcagaatctaattgattcatacggtattgcttgttatcgtgaagttaatcctggtatgtccttctcttaaaagactgtttataaactcagaaaggctccaccaagttttagtctgagaaaacacttaatcagccaaaatgcatgatgaaataacttaaaataggataaagattgcaaaacaaaagagaaagcccgtggaatgtttcagtagagattacacctcctttttcaaccagaaacaaaaatgagtgcagctcttaaattttttttgttaccggttgaaaaaagaggtatggtcttctctgaagcgtctcctaagggatttacattttttttcacagcttttatcctgcattaagttgtcaattgttctgagaggttacttaatagtgtcagcaacataataaactgaactgatattaataatagggggaaactaaagtaagcctaagtttagtgatgccattatttgtaccgaatagtaataaattttatttacctcttgaaatactcatcaaaagtaaccctgagaaatccaagtgcaagttttagcactgtgcagggttattcttcagagggtgcagatgtgctttgatttgttgctttgttgcttgattcctttaaattttttgcattttacaatggtcagaataaaaatttggacggtagtggcaataattgctttcttcgctaatcattttggtagattgttaatcggaaaataataggaatttttattaaaataagtgaggtctttttctcaccttgataaagggccactttttgtccatgtcactctgcaactatcatttaaccaaataatggtttttctctttttgtctttttgtctagcactgtatacaattatcacattcccatttttatttgctgtcatgtttggtgatgcgggtcatggagccatcctagccatatttggaggaatcatgatttattttgaacagatgtttctcaagaagaaatcaaataatgaggtaaaatattcaccattacgatcattctgaaagtcagatatatatgtatagagcagctcaaagtgaaacgctcaacaatgatgtaaatgacaacgatcatatcactcatgatcctggaaacttaattatatttttctccgtaacatgatttcttaactcacatgtttatgatggaaagtttttagtcaccctgcagtttagcataaaaaattaagtaggtatattattttttgctccagttttcgcaggaatggatcaggataataatcatgttttataattaatgttttgatagtcctgagtgcaatgtattgtacatttatattgtctttaaacaagtgctcctacatatccaatcctgaaagttatgctaagtaatatttcatatcagcttttcagtaaaagtcacagatttttttttactcattggcaaacttctttgagtagatccagttaagtttttgacttactgccaacctctgtcacaacaatataaaattccctccgggcgacagtgagacaacgacatttggttttcatgttagaagcaatgactaccacatccaaagctcttgactcacctcccatggtggatggaaaaatggatggatgcaaacgttgggcgcaagtcatcaaaccgcagagtttagttcttgactcctggcaaatgtttttttctttttcagtcggtagttctgcgaaatttggctgaaaagagaaccaaatttattcgcagaaattcacccaatatctctggaagtgaaagtcatctggttgagctaaacctgtatttggctttgtaagttttccagagctaattgaaattcttacacactttcccgtctttagtcaggaagctcccggaaagtagcagcaaatttaattgttagcgtgtgaactttgttgattgtgatgtttgttttgtaacagatttggaacatattttttggtggtcgctacatcatattcctgatggggctgttctctatatacacaggaatcatctacaacgatttcttctcgaaagcagtcaatgcatttggctcaagctggtttagcaattacaacgaatccactattctcagtaactctgacatcactttagatcctgtttatcaatacaaacaatatccttatcctataggagtcgaccccgtttggcaagtaagtaaacatccttttatttgtttcatcctttacaataaaactcatcttttactttgctgcagacttacttatagcctagaatgggccagtgtcataacatttctgcaacatatctaaaaacttgaatccatgtaaaatttcttggaaaaactgaaaagcccattctaaagtttgaaaaagcacctctaaagggagaagaagccaattatttgaccaatcagaggccaacagttgtatgatgtaaccaggccatgtttctagctgggcttcagactattagggaatgcggactgtcgttacagactgctacaaatattgtttgaatcgagtccagatttttatcacttcaaaatcgattatctccgtcattctgagtgaaaaaagttcaaaatggttgaaaaccaatttgggaagctgaactcacttaataccttaagggaatgacttaaaaaaaattcatataagtgacaatatccacgtaaaaaaattaatgttaatgacccattcagtgaacaaaattcatttataatggaattgttttaagtgtacagaatttgtaattacaaacaagaactgaaaatatccgaagtatcaaattgaaaacagagctaagaaaagtgtaaaatatgacttaaaaaagccaaacatattataaattaaatgaaaagtcaacgtgttttggggaccacttagattgtaaacgaggaatgctctccaaaaaagagggcaagtggtcttcaaatacatcggttcttcatttaattcatgaagtgagttcaagttttctaattttaagctgcatctgttaattttgcaatttttcaatttttaaatattttaaaaatgtctataaataattaaatatacatttttggagttttttttggaggcaaatttctgaatgttttcttgaaaatttataaaatgaaagtatgaggcaccaatatatgcccaaatctaatgagctatagagtaagaaaggcgatggaataggagatacatacaagactttgtgtaattttaattgcccctaagtaaactgtagttcatttcttattgtggtacacctatgttcgccacggcatatccatcgcaattttgtctggttttcagatttcctctgctttatacttttacaattttctgttacagatttctagcaataaaatagttttcttcaattcattcaaaatgaagttatcaatcatatttggggtggtgcatatgatatttggtgtcatgctgagtgttatcaaccatatgtaagtcctccggaaatcttcttttattagttttttaatagatgtccagatagtatattatcagcaattaagtatagctcttagtctgttgaacacgttgactgccttactagcccatatgagccagcagtgactggtcccacaaggacaaaaaaagaggcgagaaatgtagatctgacagtgggaaaaaattcatgaaactgtatcgctgctgtaactgatcctattaaattcctagaaatactagaaaacggtttggtttacatggaaaattcaaatccctttattatacatgtatatatagatatcaagtttgtaaaacattttctctttgaaaatttgcctttttcagtggaatatcacaattcgacggtgtgagtcggcaatcacactactcagtctgcgctgtcgcagacttcctgtcatactttatttaatgaacggaaaactactcaacagcaattctttaaaatgctatgatttttcttttctgtgctaagaaaattctacgtgaacttcaaggaattatgtcaatttgttctcctttaaaaaaataacacagcggcggagattttcagacaccgcaaacgagtttggtgaatgcgaacttacgccgtcgaatcacatcttgcatagggattaatgttggaattcgcaggtgagcaaattgtttttcaaaagaattttacagagaaaactagagaacatattcattatcgcctttgtgtagtaaaaccagtttttttcatttttgacaaagagcccatagtttctattagatgtaattgcccacatgttcttaagtgtctttttttctgtttgatttcagccacttcaaaaggaaaatgagtattattttggagttcctacctcagttaatccttcttatccttctatttttttacatggtcatgctcatgttcatgaagtggactctatatggtcctcagaaccgtaagttcagattaaattcctgttttccttttttatcgaatcaataagtttgtacagtgttaccgttttgcgtacgcaaccccgacagcaaattacgcaacattacgccgaaaaatttcccatttacgcatgccattacgcagaaaaatttttgaattacgctgcaattatgcaatttaagtcaaattacgcacaattttatgcttattttaaaattccggaatatttttgtttcctgtgtaaggtaagaatctagaagcaaaatttgtaacattacttctaggtaaaaaactatcttcactacgatcctataccactggtttaccaagatcagcaagaccaggcaaggtgtacctaacctaaaaatggcaataataaactgaaatttttaaaaacaactacacagttgttattactactacaattacgtacgatttcgcatctgtgcagatttcttcaaattacgcagttattacgtattatgcagccactacgcggagtccctcaattacgcagaacggtaacactgagtttgtagcataggcttgagaaaaaaaggaaaaaactgagtgtgagatagttgaccctcccatccccgtttcggggaatgtttaaacaagtttcactcaatcttccttttctcttgtcagtttggatgtcatctgtaagacagctgtatgatctttgggttgctcacaacattgatatatttgtgagaatgaactttaaatgtcattatattggtttttttggtgttttgtttgatcatgaaacaatgatgacttcagccggtcatctggaagttgatgtcaaagtactcctccaaaagtcattaagcattaaaggtgataagtaacttcaagattttcctctttcacacgtatttattaaagtggaaagaaactgagtactaataattttcagtattctggcctccctgggtgccatgcgccaaatatgcttaaaaattgggaaggctgggccattgtgacatccactgctgaatttttcaaacttgcaatagacggattcagtgactacgtcagttgatataatatcaaactatcggttcaaacctaaacaaataatataacctaacatagcctcatgtacaaattcttcgtctgtcaagtgtattaattcatcacaatttagtcattgacaggtcacaaatcaattgaagactcattaaacaagagaaatttttattgtaagaaacgtttgggcgcattttaccaccatgacggaaaggacatgaatcaaaattcaaaaacaaggttatgagtttttttttacttttgaattatgatgtagctactgaatcagtctatgatgaagcaacttgttgaagaacaaatccatagagctctctacgcaacgaatgtacagcctgagaaagaaaagattcaagagcgggacagagacgcggaccaaaggtcaatttagctcctagaaaattttagatggctctcaaaaattgaattctccagccaaggtgactcctaaaattttacgagggaggcaaattcctgataattttacagcaatcaacttgagctcctatgaaaaaattgatttttagtcattattttctatcgaattatgtttcagcgctaaagaccagcccccgatgtgcaccatctatcctaattatgtttatcaatatgatgctcttcaaaaacaacgaaccatttccaggctgtgacgaatatatgtatgataatcaggtatctacaattattgcactcttttttgtttactcagttcagcttgctgcaaacttttccaaaatcttcaagatgtttatcgcaaacttttgccggaagagttgtttctgctggaaagagctgaaatatcatgatgagcgcattggaaaagtctgaaatttgttccaaacactggatttgcgtagatgatttgcgccttttggagcctcctgcttgtaaagtctaccttagcaaaaacataatttgacacagataagccacttcactcccgcatttccatgggaagctcaaaatggctactgtcatgtgtcataatcctccaattaaaaacagacaacaagcgtaattctacgtattaaacttaacttggaaagcagggaaaagagtgtgtctgataaatggagtatgtagtgttgtttattttcaattgaaaaactgcgtcatggaaacccattaccgatagaacttcagtttggtttaaaatttgttgtggaaatgttctgaacatacattttatcagtagcttcagtttcccaataatttcgctgcacccattgctgtaacccatttctggtttgatttttcttcttcattttctgacaacctctgtgtttttgttttcaggaatttattcagagacttatcgtttttttctcgttcctctgtattccggtcatgctattcggaaaaccgatctaccttatatattttgccaataagcccactaaacgtcacgtaagtcgattggatgctcaacagtgctattcgaatatacattcttctgtgttctcttgttttcccagttgtgctctgctttttttctagtaaatagtgtctcggtcagtgactgaccaggacagtctttgatactgcaatgagccaatatggtacgtaccataccaccatgcgggagggaaattcagttaaaatattcaagtggtggggcatcttctagttaaaattttcaattttaaggaataagaaacatgagagtattttttgctaaaattgttgaatacagcgaagcagattctaaaaattaaaaattatgtattttttaataatataagatttttgttggcgccacattttttagcattcagtgtgccgtcctttatgaacattgtgtctttttttggtgagaagtgtgtccagggaatcgttgaatcaggtgtacaaatatttgtgtagaccgtcaaaaagaaggaatggaaggacaaaaaagcattatcgacacatattaattttttatctgccaaatcatgactgctgagacaatgggacagtctgtacttccgtagctgcttatgagatgtctgctttcacgaacttgcgaactgcgaacttggaagttctaatttgagcttttgggtagctttaattgtgccgtttgtcgtcttgggaatttaatggtaaaagaaaacttctcgtatctttcagatcagacaagtcggctttgaatatgtctcttctatatattttcagaatgcttatagcttgaaaatggtgatccaacaccaatgctttctgtgtagtttgttcatcctcgtcaaagctcgttgaaatattgtataaactcctctcggaaatttggagaccttgtctcttttcatattttgctccaaaattggaataccactaagatatgaagcaggtaacctcacaagcatgccaagtttagaggaaaacaaccaaacagtagtaagcaaatttttgaaaactattttcaatcgaagttttcggtatcgacaaatcatttgtgcaaatattgtaacatccagccataagaaagaaaagtattttacaattagtagttcatgatttgcctattatgaaatgaagaggtaggtagtgtcaaatgtatggatctcccaatatccgtcaaaactgcagaggacaaggtgtagtttaaaacctgcacgatcgaaaattaaaaacaattgattagatctaagagtgattgattgaataattctcttaaaatttctttctcagtgacagctaacctgggttttttttctttggttaaatcttcattttccagaggtaaaattgatcttgccataaaacactcgaaaaaatgtttgaagctccggaggggctttgggagggtagggctatgttgcagctaggcgtcgcagagcgtcagagagcactgtaaaagcggctcatatgtatgtaaaaatggttaaaaaactttggtcttactgagaatagtactctggaatacccaaagttctcaaagatggcttaggcaaatcataatctgtccgagtcaaattcaagaacaggattgcgtactgaagtaagtcaagaatctgacgagaagtaattaagtattccaaatgtttgcttaattcggtatttgtagttgaaatcggtttgatagaggcaattcagtaattttacaaacattggtaacattatgtgaacaatattttatcttaattacacaatcggtgttcaaactacatagtgacttcaaggtcatcttgcttccctcttacttttttgtgacaatcttgcaacacatttttcaaagatttcatcacatatattagtataaatacatctttttgaaagaataagttgattttcaaactcttctttgcttaatgaggatatcatagactgccagtactcttcttatcatgggaagccttaaaatggcaagaactcttcttctcagacttttcgtagcggcactcagcatttatctttttgtctgctggctacagctttggagtggaaatgcttgaaaatttaagagtaagtcccccagcaattcggaggagagtattatgcaactgaaagtaattggttgtcaaactcttgaagacatttgttgagaaataattttttctcctaagctgtagtcgattctttctgctgccctgagtgtccaacatttgtaagaacaatattggagatctgcttggtagatccctagatgtaactctgtttaaaaatgaaaatttggaaagtcagagagcttaaagttctgtgatacgtcatgctatggatcgtttgacctactgtttgaacccatggaaaaggcttgattatgatggtgttcgcaacaaacatcctaataatggattctttaccataaattcaaataagaaaatattgataattcataatttatgcttcacctttaatggtttagttgcgctggtcgcagaatcgtcttttgatgacggactcttgcagataagctaaaaataataaatccgtccaaaccgcaactttctacgttcaatattaacggaaatacagcccattgaaaagtcgggtttttgacgtcatccaccacagtagtgacacccgtggtttcttccaccttgcttccgtcagtcagtgacaaactggttactcaacatgaaacttggatgaaaacaaggtggaaggaaccaaggatgtcactaccgtggtggatgacgtcaaaagcctcttttcaatgggcgatatttcggtttatattgaacgcagtaagttgtggtttggatgtatctaattattgttagctaatccacaagatttaagcatcagaacacgattctgtgaccagcgcaactgacccattcattatattaaccaaactagaaactctttttgaagttaaggagacccctctgatgaaaacatactacaatgttggacactcaggcctatttgttgggtagccaaagtgttgcatgttgcatgtatgttgtgtgtgtagttttcgagtaacggcgaggctcaccaggggatagaattgcaggaaagtcggaacatggacgtggagacagacgtggtcacagccgaaacgcaggaaaccctggagactctgatggcacagacggagacggagcaagatgtccagcctgtggaggaacacgaggaaccgagtgaaatcttcattcaccaggtcattcacacgatagagtacgttctcagtacggtctcgcacactgcgtcctacctccgactctgggcgctctccctcgctcatgcacgtaagtatttatattcctactttttttccgnggggggggggggggggggagttgtgcaacagaccagtactgcctagagtccctttatactgagagtcaagacaacacccctcatggagtcacaaacgggaataaagattacataatttgaacgtttttcgtaatctttgatcggctcattcttaaattcctttctccgttccttctctcattccgtttgttccttgtcgaacccgaaattcctcggtccattccagattataatctttgcaattggtgaaaatgtaatctttattcctgtttgtgacactgtgaaggccttaaatccggttaaccaatcagaaatggattcgcattgtcttgactctcagtataaagggactctagtactgccgtgccaaggaagaacgccgtatgaacattcgagagctgccaaatttactttgataaaatgattatttttgaggaaagttatgaatatttctcctttaaattttctaaatcctcggtgaaattgcaaacaatattatctagaaaaattgggcgggaaatggttatgagtttaccaggaaatttgcattttattaaaggaaacttggcaacgcctgaaggttcatacagcgtttttccttggcacggcagaatagacaaggtacgattgtaagcattctgatacatgtccttaccagaatttcatacagggtgatccaaaagtcccttccaccccctctaactttttacctaattgagataaagatttgaaacttgggggatactcccaggtcaaagggagctacttttcggctcccctaaaattttcaggggggcccccctcggaggggcaacggcccccaactttgaattttcaaatgggaagaccccctttgtgatagctcgttcgaaagagcataaaaaaagaaaactttttgcgcaaacccgaagtcaatatctcaaaccgtttcaaaatggcggccggttaaatttcaaaacggccgaaatttcacaccggttatttgtcgatggatttgcgcgaaaatcggtatgtacgggtattttgacacgagaaaaacgaatttgacgttagattttcaaaaaaaccaaaatttccaaaatagccgccggttaaagtttaaaatggccgaaaattttcaccttggttttttcctgatggatttgcctaaaacttgaaatttgagagtattttggcataagataaacaaatttgaacttagatttatacaaaaataaatttttggtcattttgaactttaaccggtggccattttggaaatttcgatttttttgaaaatctaacgtcaaattcgtttttctcgtgtcgaaatacccctacataccgattttcgcgcaaatccatcgacaaataaccggtgtgaaatttcggccattttgaactttaaccggccgccattttgaaacggtttgagatattgacttcgggtttgcgcaaaaagttttctttttttatgctctttcgaacgagctatcacaaagggggtcttcccatttgaaaattgcaagttgggggccgttgcccccccaaggggggccccctgaaaattttaggggagccaaaaagtagctccctttgacctaggaatatcccccaagtttcaaatttttatctcaattaggtaaaaagttagagggggtggaagggacttttggatcaccctgtatgtaacttaatgtgtgcaataaaaattacttaaataactcataactaagatatcaatgtttttattttacattggtgaagaaaatttggaattccctgttcacaagaagaacagtggtccactttaatcaactctcgcactaaaacggttttggcaggtttcttaattgatcggtgctccctctgcactttttgttgttcaaagtgttgaaaacgttcaacagctgagctgaagcatcgagattcaggttgccaaattttcatactgcagagactgttaaaaagatgtttagtgcttgatttgattcatattaacttttgttttttcatgagcggcagttttgaatttaagtgtcatgtaatgttaaatatcttagtcaggagttgatttcagttattttcgttgcaagaatcgtttttcatgtgaaattttggttaaatactgggttgaaaatgcttaaatgtataccttgtctactggtccattgatgttgttcaatcgtttagggatgacaagaatgtaaatgagtctttttagaaaatcgtatttgcaccaaggtaaagtacaaaggaagttagaattaaaatttaatcaatttttcgcccaagagcctttattgcaatgtcgcaaaattgccaataacagtccattcttgtttaagtatacaattaaacacatttttcaagaaaaccaacagagaagccacacctgacaactagaggacggattggaatactctggctacccaacctataggcctgagtgtccagtattatatgttctcattgaaggactctccttagttttaacccattgccttaaaatgacggctcccagccgtcatcgcagggctaggccagctctaaaatgacggctcagagccgtccgctgattattagcgttatttcggcgattctccggtatattgcattctcatcaatgttcatatgagtagtgcggccaccctatgacttattgtgtgcggtaatttcttgttttgttacgaaattttcatactactgtgcgttcgcacatgaaataacctcaaaattttctgattttcgctgattttgcgatttttgcgattttgacagctataaaccacgttaaaaaatcattgcgttcaaagttttcaccatttttctcaaacgttgtattgtgaatgcttattgtgtcaattttcacctttagagaaataatttctggattattttgaagtgttcaaagttgctgattttcgccaaattaaatcggaattcctggcccggcagggtcaaattaaatcataagtcaatgggttaagcagaaattcaacattatagcgttcaacagcacttctttttaagtcgaaaattctgtttgtgcaactgggcaaggtagatacaaaccctttcccgatgcctcgaaggttttgtgagatctacatttttcaacctatttagccactctgtttgggtaaaaacaatagttttggttttctgcaattgacattgaacgcaaagcaaatgctcacttcttttacaacgctcttcacagtttaacatctttctttttgattccttttgcagaactgtcggacgttttatggggcatggttctgaagattggactccaaagagagagccacgtaggtgctctagtattgtttataatgtttgccctctgggctgtgttcactgttgccattttagtcatgatggaaggtctctcagcattccttcatacactccgtcttcattggtgagtgattggtagcatcttactctttcattctgacatgacactaagcttcaaggcagctgatatagttcagctcaggctcatgatgatttctcgttgaacttatcagaagcaaatctcaaggtttttgaaagtagaggagttctattatctgtgtggggcaaacgtttaaggatattccaatgctcaatgcaaacctcatttatgtttacgctggtttgatgcagaagcaaatatcagccattctgaacctccttccctcaacagtatcctgttatatactgtaagtcagatatattttgacagagaagtttgtccccttcaatcttgatcagtctgtctcttgaagtaacatctgctggattgcaggcagtctggaaaactaggaacgtcagggaattttcaacaacctgaaaaagtcagtgaattttcctaagaagtcagggaatttcatgcgttagtgcttagcagaagtgagtgtaatttaaaggaaaaaaaggaaagtggaagtttcattcgaatgtcagggaaagtcaggaaatatgaagatgaagaaatcttggcaaccctgaatgatttcaaccccaatgaaaaaatcatagccagcagaagaagagaaactttgtgaagcccatgattgctgtttccatcaatggattgataatttttatttttgggccagaggtgccgtaagctgggagggttgctgttggtgataaaatgaaaacaatcgcagaaatggatgtttttaaggtgacctttaaaggaagttgagtttttgttctggatagaggttttgaacgaggaaagccaattttaaaggaaaagatgtgtttacatgaactgtatgtaacagaaaaattgaaaaactgcttcatgattaaaattcatcaatcatatcacaatgtctcgcaaaataggacgctgcattggtgatgcagtaaactcgcaaattgacgaaatttacgtgaaagttttaatccttggaaaaaaaacatttacctcatcaataagtcataggttaagacagaactctacaaaatagatgacactcaaattgaaaaattgatgatgttatcaagttgatttttctccacataattacttattcctcaacaatcaatcattttttgaaaaaaattcaaactctactggaatgaaaagtaaattaatgtttaaaaaaaaaaaaaaaaaaaatgtaaataacaaaattttgtgagaaagcttaaattagaaaggagaatactcatcagaacttaccagcatttcactctacatgttcagttcaaagttgctccaaacatatatattgaagcatgtttcctgtcactcccattaatatttttctttcttcttttctttagggtggaattcatgagtaaattctacacggggaccggatatgccttccaaccgttctctttcaaacatattcttgagagtgaggaatacacgtgtaatgaagaataaggttttttcaacgacttcttgtaatttacccgtattttactcaagtcttaggtataagtataccataatgttacgcttggaagcttgcgcattatacaatcattcactttttcgttgttaattttcatcttccctgataacactatctatcttgccttttattttctcttaaagcaaaattactctttagttttctttttctcttttcctacctcagtgattacaaacaagtgaaattttgttggtcttgcaatgaatgaagataatccaaatttccacaacgcctcctatcgaagcacagcaagtttcagtcagttttaaaattggaattaaaaaatctcacttaaaagagccatcagttgttaggagattttttaaaaatccataatttttttctgagaaagatattttcctctttgactccttagcctccaaatgtgaagaaagaaatttgtaaggaaaactgaagaaattttgtaattactctcaggtttcaagatttcattcctcaaaaattgttttaaaattaatagttcaagctgtgatactcagtagcgtagccaaacattattaagggggaatgcagtaaaaaatccttctttgttcattattagaaaatcctgaagtcaggtcatggggcacctcgaaacccctgactcttcaatgtctgcgtctttggtgatgctaacaaaatcttaatccaaagttttagaactaaaccctttaaatttgccaaaaatgtaaaattgtaattgtcgtttcttctcagaggaaattcaaatttcatgaaaaagtatcgtaactttcgattgagaaaaacattgtggcagagatagtgtgttatcaggacccaatgtgattttgtggcggtgagtggccccttgtgatttgctttccttcttttaaggtgtttttacattaattttaagcctctgactacagtttaagcaagacctgatcgtataaacacaccaaaggtcatagatcctgttctaaaactaagagtaagtgctcattcatgctgaggtcaaaatatgttgttccgtttgtttacttaaaatattatcatgtctttaatttctatttaaaatatcatcgaattgaaatgcttaactaaagacatgagttttgcaatggtggttactgcaaccagaactatttttgtagtcagtgtgaatgctctgtttttgtcaatatggtaggtggaaaatttttattttgttgacctcaggtctcataataccaagacacctttatgagtaagccaagaactaaaccactggatcataactgaaatttttcaacagtgatttttatgtcaaaatttttatttttattcttgtgattagtttgtaaatttttggaaccttaaaaagttgtaagattagctagtattttttttctctctttttttcttttttgtgcaaaagatagtaaaactggtagagcaaacactatttttactctgatatatttttggttttatttttgtaaacatttatctatcaagcctgatttttaataattttaaagcgtatttatcaaagctgtttttttaaaagtgcaagcttgtatgtattttcgacaggccattggcctagtttaagagaaacatggggtaataccttaagtgccaagtcagtggaggttgtgaggaactgtgaaaactgtcagaaatcaaaatttctcaaacctctaggaagaattttttagttattacttttcaacctaaaattctaaagttgtcttgaacggattgtttttatcttacagtaaatacttatgctttttttcgggtcacgaaatacgtcatactgaaggaatcaatttttttatgaagttgactgaactctgttttccaatggccttaaaagttatctttactcatccattgcgtacaagtaacgtgatttgagtcatgtggcactgctgcaatctgaccaagatgttttgaaaaactgaatcctgaatatcaaaaatttgttaatgaaatatcaaaaaacaagtttattttccctttgaactgttacagagtctttttatatttcaactttcattctttgtattctaaactgactatcatcacaaattatttttatactcgtttagaaattaatacttcactcttttactcggttcttaaagcctccttgtttccaatattttcacttaaatctgagaaggcttattttgctctacgattatcaaggtacaaatatttttgtttaagatttttttactttaattgctggtgtatttttctgactattggattatatcgtaccaaccctttgctatgcatgccgaatcaaatgaaacattttaggcaccatcagttcaagcaaattgcatttcctatttgccctgtggtagcttagattttgcaggcaaaggatttttgatttatctagattgttcaaatgctcccttgtaatcacgcatgctcatcatatcatgcattatcaataaaaccaatgctctgcctttcgtttaaaattttaggaccactttagccggaaaactcaatttttagaagccacctacaggttttaggagcaaaattaacttatttcatacgcatcatgactgcaaatcgtgcgttgagagcatcactgctgcttcatgactgcaagtttaaagaaattgacgaagtgcgtcaactttttaggggccacgatggcctagtcccctctatctttaagcctcaaagcctgatttctagacgcatttggtgaatggtatctggggaaggcagaagactggataaaattcccaattttatgaagtttgcaaaattatttgttttatctttggaaacttgcatcatacatcatagtggatcacttactctgtaaattttgcccttacttcttgtgcgagaaaaaatttagaaagtttcaaagtggcttgtattatcaattcctgccttacttcaagaccaagtgagcacagaaatttgacctcaaataattttgactaaaactataattttagggaccacataaaagacaactcagcctattttaagcctctattctttcataagtttttttcttttctttattaaattttattttatttttccactcattgaacaccaataattctcaatgactagtttttgtatcatattttgtaagatgtatacttgtaattttaagtgccttgtgtataataatgttgatgaatgattctaccttgttgataaactgtttctataattacaataaaatattaccaaaaacaataa

SEQ ID NO: 26 - DNA, 22122 bp, Bemisia tabaci
  source 1..22122: mol_type = genomic DNA
atgacagtaagcctaacttttaaagttggctcccttccgcggatgagcgtgataaatccagcaaaaatcatacacaacacaacatcgaacggtttcttcggaattaatctaaagaagacaggcgtctacgatagtgcaaactggaattacccgatcgcgctcggacaatcaataaaacgcgactcgatgattctgagaaaaaccgaattccgatcaaataaatatggcaaccgggtggctagaatgataagttgctgtcgattggaaaatagaacgaagctgtccgtcactgcggccgacaaaaatgaaaaaggcgcggggcatagcgcggttcagggggtggagggggggctgaaaaaagaggaaagtaaggtccgaatgccaaaattaatgggcgatacaatgaactcttttgaactattaatatcgactcattgtttatggcctataggcttcggctccgtcgcagctaattggtattctcataaaaacgcctctaaactgtttcattgtttggcagcatcataccagcgccgtgtcatattatattcgagcccggtgacccgggagccgggcgggggttccggggggcctcatccatcttgaatagttaatattgctccgagccagaaaatgctcgccaatccacatatcgacccgaccactttcacacatcatacaccaactttttattttgactctctcctcgctcgtgatccgggctcctttctctactagctcggcttttgaggtgccttcaacggagagcgattgctgcggactgattattgaaagtgatagacaaaaagtaaaatggaggcatctgtttggttgaaatgggtggttgttacagacgaagggaaaaataatggactcttcagatcatctctcgtttgttgccgttagctcgttagtctactcacaactacctctgtggtccattgcaacaatccgcttccaccgatgagagcgctccatgaaccttttgtcctccattctaacgctttgtctatcaatttcgataattagcctcccttcagaaattccttaattgctctttatttacaactttccctgtcagcttttctcggtcacttatgctcctatcgcaacaagttcattaaaaacgtgatataaatactttttttttttttttttgtaaaaaaaaagtgaaaaaacaagtaaaatgctaagtttacgaatatgaaaagttgaatacctacttgcgttcaatgatatcactttcatttcctcccacccatactttttggtgatgaattaaggagagtcaaaattagtccgagggattcaacaacctcttaaaaaccaagtctttcctctgatcagcatatcctgaagaacgcaatccccggattcagatgtttcgcgccacattcaacggagagataatctctccgaaaggacgtttctcggtcattttattccacttttccggcttgagcctcgccaggaatttccgaaaacgggcgatcgcaaagagcctgtctggagatttgcatttcaagttcagccttaaaaatagttaccgctccccgttttcgcagacgcgccgaattgctgaaatgctccgtcacagcgctttcctccgatctatttcctgcgatcattcaaaatagaaacaaaaggactcgccgaccggacaaagaggaagcaagaacaatcgatccgatttgacgtagtttccaagtacctctcggcgggcacaatcgaaaaaaaagaaaacgaaaatcgcaacggcgtgacggggacaatgaaatatagatatcgatgatattctcggtcccgatgatacacatctactatcgatcgcaccctggaaataacttattcatgcgtgatctgatccgcacgccatggtttaatttctacgtttccggtgctttgtgtctctctctctcgcgcacctcgctctcctacgctgccttcgagtcgagcgcatactcccgtatcgataggtggaaatcagggaaaatcggtgcatcatatcaccgaaataaaacaaatacggacgagaaacgctttttctccgcctcgctggatcgggcgaccgaaatagcctcgtcacttttccccaccggtgaatgaaacggaggcgatcggaaacagagttctctatgagttcgtatttgaatgttcgtgtttatcaccggaggaaatgagacagctcatgtggaggcttttttattctttttattaattttttttctctcctctcaagaccgggacgtttacctgcggctcgtgggatgactgccgggattcggaaatgagcatcgcgaggtgggtttccgttcgccgttttaaaagtttccgcttgcgacgcatacaccgaaaaattgagtccgtacccggaatttcgtacggttcgagtttaatgcacacgccgactatactctcttctttgttgcggttgttaaagagggagtgggggtggtatttgtcgggatcccgagcgttatctattacttatattgtcatatcctcgcatcaaaccgtgagataattgatgcgaccttcggttaaaaatcatatctcccgtaccaatgatgacacatacagcgtatgcatgtacagcttttttatacatattttaagttaagtttgtcagtttgacgctgttggaagaattgagaggcttggaggataagtcgcataagtacaatttttgctatttcgagaaatacgtatttaaaaattggaaattacattgactggcagaaaaaaagttcaaactgattacttgatgctaaaaaattggaattttggaacggctttttcgccagatatgcattaatattagttttacttgaactaattaatatctcaattttttcaaaaactacacttgtgcgccttgtcctccaagcctctcaattacgctttcatttattcttattttttaagattcttctttactttgatccagcattggaaggttggtaatttccacacgtaaatttcaatttttaggatcgtgaatttgaaaatttagtactgtatctttgagatacatccgcaatctatatcatacattctcccatttcaatcgtgtgtattgtggatttcttgactcagtagcacgtcttttcatgtcaacgttttgtcataatattccctgcaacaatattccctacaatttcccttactcgaatggttaatcactatttgattttgtttgtttcagatgaggaatcagtatctggctctgaggacgagaccgaaagcggacgagaaggtgaaaccacgggtgaaaaacttgaccccatgtacaactgcgagtcttgccaggcggagttcccgggcttgtccgagctcttagatcataagaaagattgtgtctcgctgaggacaccgatgacgaatagctcgaggtccggtgatgaaggtctcgaaaacgagaatgacgccgaagaccacgaggccctggacgatcccgagcaggagactgaaaatcctcaagaaaatgatgacgaggaggtagacagcatcaacgaagagggaaaacgacgagaagaggtgcgtcgtcaacgccaggatgctgaaaacaacaacagcgtggaagagggcgaaactgaaggagaagagaacgagttgccccttgggtttccttttccactgcccggccacgtgaccttggaagctcttcaaaataccaaagtagccgtggcccaattcgccgccactgcaatggctaacaacacggacaacgcggccgccctccaggagcttgctgttctccagtcaaccctttacaccctccagacgcagcagatgatgcaactgtcacttatccagcagttgcagaggcagcttcaaatcacacgtccaaaggatggtccgtcacctcctcctacgcaactgcctgccggtattcctatctgtgttccaaagccgcctctaccacctccagctgcaccaccacgtcctagcagaacccccaccccggtcaaacacgaagttccttcgacgcctcctacgtcacagtccctaccggccacgcgtcctcagtcgacaactccaccagcacctcataaaccggctgcctcctcgtcccccattagcattccaaccccatctctacctccttgttcgatatcctcttcgtttgcttcctccatcatcacaaattacgatcctccgccgtcgccgagcgaacccaacacgttagagatgttgcaacgacgagcgcaggaagttttagataatgctagtcaaggtctcctcgccaataacctagccgacgagctagccttccgcaaaaatggcaaaggaggctcaatatcgccttacgactccaagacaggcggtagaaatgaaccattcttcaagcataggtgccgctactgtggaaaagtcttcggaagtgattcagctctgcagatccacatcaggtcgcacacaggtgagcgacctttcaagtgtaacgtgtgtggtagtcgattcacgaccaaaggaaacctgaaagtccatttccagaggcatacttccaaattcccgcatatcaaaatgaatccgaaccctgttccagaacatttagacaaatatcatcccccactgttggctcagattgggcagcatccaccaggagttccgtctcatcacccagtccctcctcatccttcgttcccgtccagtcctccattcccacactctggtctaccactctaccggccaccaccatcctctccgcacgatctcatcctgcctccccatcatccagccctgaggccccaagaaaatttaatgaaacccttgttacctttacctctattcggtccaagaccagtcgagcaagaaatgccggaaaatcttagtaaacccgtttcatctatccagtcgtcgcctcctccaccatcagaacacagtgaccggtgcaagagggaatcatgtgacgaagatccacaagacttgtcggagtcaagtgagcccgctaataatgatctgaactgtcgcagcatttcaagattagacatggaaaatgactcggatcacgagccggaaaggtatacttctccctcgccctacgacaactggagcatagacagcaagcacagcgacgaggatgcaatgcgagatgtaaacagccctggcatggatagtcttcaggaccagcccgagaacctttccaataaaagtacgtccaaaataacacatcatttatctaaaaaaaaacagtcatcgcttttttgaacctctctctgtctctcttccttcagtagcgtttctttgccatctcccgtagttcaaccttttcttttctccaagatcctctttccggcctctcattttactgaaacctcctgcctcaattaagtagtagggatatcacgaggaagagtctcattgaagtgaatgaaacttcagggacgacacaactccaagacttacttgatattgttggctataataggtactggtgtgtaaatgcactttaaagcttatttcccaaagatatactggtgagcgatcgttccgttttaaaatatgaattagatcacaacaaattaatagtagcccgaaaattcgcgtcgacgtgcataatctaagcaggttgcttgtttaggagcatttttatttggacactattagacccgcctacttatcacgaaacgaagggcttaaagacgagctttggggcccatctatttcgggtctattttctatcgtgtcacccatcatcaaagcaggaaacaagtgcagtcatgaggtaatcaagaggtgttctttaacagatgacttgattgcatttaaaactttaagagtcgatagtgacgagattgcaactgagtttaaggcattgcgtctttagtgtcctaataatgcgtttggtcctttctcagcctcgtcacaccaaccggtgagcccttccgcggcggagttggaggctctggacctgacgccgcgccctccagcagggatcttcgccgggttcaacctgcagcctccgtcaaaatcgtcgcccgccgccatgccgccaggtctgcctgcctcgttcagtccagtgggattctccacaggtatgcgtcgatctcctgataccttgggacctgtgcatcgtgtctgtgttgcttacatctgcaccagttttccgattgctgttctgtttcccaagagccttggtaacatctcctgctttgatgttgtggtcacgtcctccaatctcactttcgccccctcactgcacccacgcatgcatcgcaccgacctctagcatgacatcaagcacactgttttgtggcgtctgctttacccacccaaaatgtattttctctctttggttgtttttgaatcgatgttgctgaaagttatcgtattttcatcgtaacgattgtacaaatctttttcccttcacccgaaaagttgtgaccctctatgtagcatggcaaccgttcaacatcatcggactcccgtgaggagtcaataagcatttgcctccttcccccacaaactttttctagctacgctaattctagtatcaccgttcctgaacttgcaatttatgaaatttggcacccaatattcatgggatattaccctctatccagggccggattaagggggtgaccacatgggccgcggcccatggtggcaaaatgtaatttttcaatctttcaaattttccaatcttttagaatgtaggtatcaaaaaaagagagagaaaaaaatctgattcagaaaataaactacaaacgagaaaaggcgacgaaatctctcatttcctaagagtaaaagtatagtaatttctaattttgtcgtcttttgatgatacaagggacagcacccggacagtacagggacattagtcgagttaagagagaaaccaaacacgcaatttgacctgaagcggaacggcgcagagagcaatgatgacgaggactgagatgaaaaagagaagccctcggcgcagcggtcgacatgaaacgcatagcgcctacaagactgcacgaatacttcacgcattgcgtcaagcacgctgcggttagcagcagtcgcgtcggcttgaaatgcatagcgcctacaagactgcatgaatacttcacgcattgcgtcaaacagtgcggagcgcagcggtcggcgcggcgtgagacgcatagcccatgaatacttcacgcattgcgccgaacacggtgcggtaggcgcggtggcggaagttaaaattattaaaccacatttatgtttgttctttcataattttttcgttcgtttgttatgaagggaaggcctcggccaaacagggatgggtttgcggaacttaactttcgctccaagtttcgtgaacttttgttagtgttgacggggctttcacaaaaaatgtgcccaacacgagttaacgcgtcttatgcacccctcctcttccggcacgttctcttgatggtttgtatcgatgttccaaaacgaatgagaagggggcggaaaaatacaggcggcccatgggcggcaagtaggtaaatccggccctgcctctatcgttcgttccttgcagttctcgctatcaccttcctatttggcgaacgtgttatggtctgtctaagtcaatcacttttcgcccattatagtgtgattaagaaaaaaagaaaaaaaaaagtaagaaggacagggaagagaggatgaggaaacagcagaagggaaataattacatgctatgctcgtcaaaaacctcaggacggtctttctgaattttactcacaatcagcaagacaggacaccaccaccggtgcgatgcggcgagttatctgtcgcgccaacgctcaacactcaccgagaaaaatttctgcccaagattaaaggaaacagtataattagcactctgtaaagtaatgaacacatcgttgtcaaatctctcctagacaattcctgtcctcttccaatgtgttcgacgcgtgaccataggcaaacttcacctctagaatatcttctaacttgaggcttccttcagtagttatgaaaccctctgacctgtccaatttaattatgagtgacaaagtagcaagttgtatttttctgatggtcggaagtaggtttcgattattttccttttaatgtatttttttatccatttatttctttataatttacctgaagactccatttaaatctcttttctcttgccaaccatcttgtcatccatgtaacatctcatggcctgaaattatttgatgaactaatttttgagaagttaaaatttcgtcacgagaaattttttcgttgaggaacggatgagatacgaatggtcggaagtcctaaaaatcctctaatagccatgatttattacgtttttgcatgttttcgtggtgataaattgtgtcgttcatccatttattccagtcgatccgtgcatgccccattccgtcggaattatagataggaacttttatttcatcccggaagtcctcatatctagcgctcactagtatacgataattaaataggtaatcacataagataccagtaatccttgaatagcatccaggattccaggctataccaatcttttcgaaaaacctgctgattcaaatgatactattgattgatatcatgcccttgtatttgtatttatttatatatttacctcctatttaacttattactattttttgcggcttgaagacatttcttgtaaaagggtatagggatgaggagttttagaaggagtgagagagtgccagctcccagagagactatgggagaatacggtactatggcggctaaaggtgcgtcgcggagctccagagagcgctgtaaaagcggcactaatgtatgcatgaatctatctaagtttctttaagatataattagaaaggattaattcattgatgattctctccaaatttgaaattattgaatgtgtgtatgtaatatgtatatttacgggggataagtagcaaaacaatcttgtaaagagatttttcaatgcatgagacatagcacgagtaattctgaaaagtctcttgttgaacatgttttgagtgtcacgcacacttgagctgtggcaccatcgcagttctctctcttgaaagtacatcagaacaatgagtggagattctaaagagtgtaagattgtatgggaggtgataatttgtgtgtatttcggccgagacgggacgggaagcgctttccaggccagctcacctctctctttttatgagagaaagaaaacaacttccacatcctgaattaaaattaaaagtgtttccgcacagatcgctccgcgcaggaatggggaggaagcgtgaacttctctcgcactcagttttgcacgctgttttattagctagcaccgctacgaactgttttattttaaattattatcatccgcaaatattatatctctattccttcgagagagacgagctcgttcttttctcccacaacatttttagcatgcttcattttttaaaaatgtctcggaagtacacgcgtcgcaggcgattccatttcttgaggattggccgtacaaaactatttcacaatatctgatttgtatgtttatttttttacagtgaggggcaatacgacttgcaatatatgttacaagacttttgcgtgcaattcagcgttagaaattcactataggagtcacactaaagaaaggcctttcaaatgcaccgtctgtgatcgaggattctctaccaaggtaacgtatttacctcctcctctgtttttatcacttatcataaattaagggttgaagaaggactggaaacttatcctcgtttcatgacgtttctgatatcgtcgtctttaatgtgatcgaaaacccgcaacttccagaaatgaagcatgtcgatggccaaagtgcgaaaccacgtattttcattgcgacgtttcaaaagttacgtttcaattttattttttcgtaagagataagccaactgtacagcctgaaatgaatgttttgctgacaaacaaaaaaaaatttcaaaaggtttatgacaacgtctggtggttcgtgtggcattcttccttagcatgcacggtagtatacgcatatcgtcgctgctccggcattggggcgtatcttgcagtggcgtggcgttaattgcgataaatcgattgttatgccatttaaacctatggaaaaggatcgataaacagggtgttcgcagcgaacaccttactaatcgattctttaccataggtttaaatggcagaacaatcgatacgtcgcaatccacgccacgccactggtatctggatttccgtatgagtcctggaatgcatgaattcatacgtaaaatggggctcacgtggaaactgagctacgcccttacgtcagagaggcgacgatatgacgtcaagattgatctacctttgtttcagcgcgacactcggtcggaaaattgagaaattggcctcggttggtaacgtcaaagcgctcttcattgcggcgatattgattcgcagacattaccgtcgcccacttcgatttttcgcctggcgctaattcttttcaaaggcgtcgcaactctctctctctctctctctctcgaatgtgggtctattttgggacccccctccctcgcctctccacctcacgagcataaaaaagagggggcagagcggaacgcgccttaattaaacaaaacgtgatgattttaacaaattagttggaatgaaaacaatacaagatgaataacagtggatatatggctcgtcttcgctattgataaatgcgtgtagcgcttcaaacgctgtccgctcctcgtctttatttatagttcacggttttatatcatctatctatctttatgccccctccctccccggctcccttacaatcgtttttcactgttgttccaaacaatgctggaacctcctgttttacgccgttccgcattcgagcgatggagagagtttttgagtttgaagtcgtccacgcatcgtattgtgcttaactgccgaaattgagttccgagaaaacacatctttgcttgaatgctgcattttgaattgacaaggattccaaatttttaggctccgattcatcatgtttccagaggcggatccagaaattcggcaacaccgaatttcctccatttaaacctatgccaaataatcgattcttgacggagcacctggcccctaagaatcgatatatttccatgggtttaaatagaggaaatccagtgttgccaaattgctggatccgccaatgcatgtttccttagtggcattttaaatatcgatggccgaagtgcaaaaacacgtatcttcgtttgcgacgttgcagacttcctgtcattcagtgttttttctttggaaaactagttaatgtaatttcttacgtgggtaggtaatttgagataaatgctatgtctctgacaaaatctgatttctccaaaaacgaggactactatcagtgcctgaaaaacaatttaaccatcatcagtcacagggggccctgtgcagtagtcttgccaatattgtacacatgcgtgcgagattgcggtgatattgccgaatcgttcagattcattcaatacagttgaaaatgaaagtatgaagggattgacatcattctgaggcacgaagcttaagagttttaactcgcgcatcattcccgcccggcaaaacgggtgcgagaaccttatcacgaagttatttttaaaaataacgcgatggcaacgttacgaagacgttatgccgggcgaaatgttcacctcctcccgaaagttggcaaatgctactgggaaatcgggcaatccggctcgggtcacaactcgcacacaagcacagccgaaaagaacttaaaccaacttacaaatgaatgcgtgtaacaaagaacacggtgattaataaaccgaaaatttacaataaatgggaaaaaaatcccggcgagagaaagattgagggggggggggcacgcgagactaataatcccctgcctcccacccgctcgccgctggtagcattctaattctggatcaagttcaagtaatgacgattatattttcctttcttctggatctccatacggagcctcgttagctacgcgactctattgttctacccagagctcatttttataatccggtgtttccacaggaaacgttcgtaatttatcgcggggcaactaaattttaatgccatcgttctctttcttctccctctgaatccttccccgagccgtgttaaattttcccctgttaaaaattgaatcagtgattacgaaaacacacaaactcgaaaaaatgaaaataatcaagacacacgcaaaactacacagtagttaaaaaagttagcggaagaaaaagatctttggtaccgaaagacaaattgtgcttaaagacactttaaagggtcaagttggaacagatgcgttatcttcaatgacctttttgaaaactgactctcatacatgaaatttgagcatttttgagataccgagttggtgtgttttcgctctcactgattcatttgcacgaaatggtaaaatctaagtttgaagcatccaataaaacgatccgtatcactagttcgatttgaatcctcctattcgtatcctaatcaactttttctcaataatgaaagaatgtaattggatttggacacatggggctgaaggccactaatgtgtcctcagactaggcgatttctgcacgtgcagggcactaactggaccttgttcagcaggaaggaaccaagccacatcagatagtgccaaattcaactgggcaatttaatttcttacaagagaacggttatgcggattcctttgaaaatattaaggatcctgcttcgcagcaagcagaaaattcactgaaatttgccaaaaaattcgcgcaatcgttccatgtaaaaaattaaattgcccaattaaatttagcaaaagctgatgtggcttggttctcttctgcttcacgctaaccattctgccgtgccaagggaaaacgccgtatgaaccttccggcgttgccaagttttctttggtagatcataggaactttttgggagatttgtaaatatttttcatcccatttttcaaataattttgttcgcaatttcaactgaagttcctgaaaatttcgaggaaaaatattcttagctttcctcaaaaataaacattttatcgggagcaatttggcaactctcgaattttcacacggcgtttttccttagcacggcagtattgtctccgaactaggtgcttcttgcatccgcaggcgaccgactgagcgatttccgtgcatgtaggccactaacctgtcctcagattagcattggcggatccagcaagttggcaacattgtctttcctccgtttaaaactatggaaatgtatcgattcttggagcggccaggtgctccgtcaagaatcgattatttagcataggttaaaatggaggaaattcggtgttgccaaattgctggatccgcctctgcagattaggggatctctgaatctgcaggccactaactgtccatctgcacctgttgcagggaaacatgaagcagcacatgctgacgcacaagatccgcgacgtgggggcgcccaacaaccacggccactacgatccgaagacgccgctctcgacgacctcctcgctgcacgacgagacctccaacgcctcgacggagagcatgaacacgagccggagcgagcgagagcgccccgtctccgtggagcccccgacgcccgccccgccggcgcccctcaagatggagcccaccccgccgcccccgccaccgccgccgcccccgcagcaacccctcgccgccatcaagcgctcgccccccgaggaccctgccggtgccccgcaccccaagcgacaaccaagtaagaatcacattctcaaaaaataaatccttggctcatgcttgcgtccagtggcgattcttgaaatttggcaacactgttaataaacctttattgcatagcgttgcatgaaagcaacaaatggtttccagctttatttctatgctggagtattaaattgaatcaaagcaagaaataatttttggggaacattatatgtctgatctccatgcttagaaaaaaaccataaaaatcgattccaaccgactccagtgtcgaaaaaatactgtactatgtagattttctctccaaaatcaacgattagctcatgcaacaaagggttactccatttaaagtcatcagatatatcgattataggcgaggcgagcttccccgccttaaatggaaaaagagcagtgctgtcaacttccaagaatcgtctttgcttccatgatgatttttaaatttgacgtcatgagtttgttttagcttacttcaagctgaatttctctgggagcaggaaaaaatgctcgggtttagcaaaaaagtagatgctgttaatcagcttaggatcattcttcatatgataaaaaataattacttcctctataaatgtttggtttaacagcaccataatgactgtattgtgtgtacttttttactaaggtgttgtgataggtgaatgattactgtcacttcgagccttatccaaaaagacttaaaatttgcctaaatgtcagatatctcgatctctctgtgcatagaatcggttatcaccctgagaatgtcgattttctaacatgacggaagtgagtcgcactctcaagtcctaaccatccatgaaacggtggtgtaccgtttgtcgtatcgtgtataaatgaaggcgtttttattttttattattatatcaagctttcttaaacacttaatctgttcagtttagttccctatctgcgatttttacatttaagaattgtgagatatttatgcgcaacatacgtcgaataaaaaggaatattagtttcttgtttttcatcgtcaagaactcgtcactcgtgttatgcgttcacgagtgcgtgaaatcgcctaatacttgactgagagattgacaactatctctcccgtagcagtcgttgaaaagtttgaatcaggtaccattttcttcgctgcaatgtttttgctctttctcatgatcaaattcgtcctcttttcaggtataccaaaacatttgtgccatgtttgcaataagaacttttcatcctcatctgcacttcaaatccacatgcgcacgcatacaggagacaaacctttccgatgcactgtttgtcagaaagctttcactaccaaaggcaatttaaaggtatataataactaattgatgttacataactcttactcttataactgctttccagttttaaaccaatcagcagagggatattgtgtaagccctctatttggcatagctttatttgacgagcaagggatgaaagatttattcatcccttcaattgaaaacaagttaatttgccattttccgtttgcttctggcattgatcgaaggtgtactgtaataaggtgaaaaagttaagagtcagaagaggtagccaacactgtccatcattaaaatataaattttgtttcatggttgttccaaacaaatttttattctactctctttatttctgttttattgattgcccgactcgtaatgtacgtgttattaatttcaatttgtttaacactaccatgctggcgaatagcaccttatgcgcattcattggttgccaaattgctcctaataacatatattttttaaacaaattcatgcttatttcccgtccaaatctatgaatacacttaattaaattttgagttaaaaaaatgcaagagaaaaaaaaccataagtttcccttaaacacatttttttgcaaaatatggctggctaagcagtatggaacatggtaaatgattaaaaaattgagctaaaagccaaaacaaatgttttgtttttttttgtaagttttatattatttctcatctacaggtagtttgaaatattacttgcttactttggcttttgactcgattttttaatcatttaccatttttccctcaaactttactcaacttaaaacgcatagttggcaacgttcgaacgttcatttacctaactttgttctctccagcgcgccagggtcaattgtcatctcatttccgtcctaattttcaacaggaatcataatcagtactcaagtattatttcattgttatatttactattttttatgtcatcaggtacatatgggtactcatatgtggacaaacggagcgtcccggcgtggacggagaatgtccttggatttacctcccctgcccaaggattcgccagaatttctccagcggcgtcctgatctcttttatccataccttccggcaccattcctcaatggaatgcagcaaaaggtactactttcaacttttatcatccaacaatattgtagactattttgagcacttaatctagaaaatttattgagtttttcttttgagtaaaaacattacttttgtgtttcgacacacattggaataattcgctcccttttagtaaaaatgaagcgacttctgataggagtacctatgagcctgagcacttaaattcgttgacggctggcctacagaaatttctcagccacctccactttggcaggcttttgcatttttccctcaaacacagaggaaaaaattatggaaattttctaaatattttgattcctttttagtcaggtttagcgtgacggaagtataaacaatgtcacagactaagatacaagggtttcgacttaaatcattgattttgtctttttacacatgtaatgtagttgatttacctaactcatgcatacggcataagtacacccacctatattgatcgtttccctattttattttgttgctcattcaattttcatggtgcggttttgtaggtcctattagaaaagtgattgattctaatctccggtgttcatgtctccaaattacagttaaatgaaatatcagtcattcagaatgttggcagcaacgtaactaatggtttacttggatttggagcatatggtggcctacattcaggaatgaaaacccctccatcgcctctatctgaaaagccggcacattctcccttacagcaccttggtgagtaccacagtacttaaatattgtgttgagcgatatcctaaaaaacagagattacaccatcctttattttgatagcatcagtttgcactttcgatcatacttgggatcattgtgttgcctatagtaaacattgaaggcgaactgccatggcgttaaagttacatctttctatttgatggtatgcaaaatttgttgtgtgtattccgggcgagcgggacattttacgatgatatcaccattcaaccacgggggagctcgtgttgcctaaaccgtaaattgtaggcgaacttgtcaatgcgcttcgatggacggacagacacgctgcggattttgtttaggtggactactattgatttttgtcagtattcattcttttacttgtatttttcacgacatttcgtcacaatgtcctgcgaatccacaaaataccctattcaaaatggttttcagacttctagcatactaatttttcaattttggcaagatatcgtcgttttaaaaacgtccagctttacgaaatttcctcttgcaaattatatttctataccaagactgttgcgaatttctaccacaaagtttcactggtttttcttgtgactgcacgaaagaatcagtcaaagttggacgaaaattgcaccgtcatacactgaaaagaaggtgcttggctcaagcatgatgactcttgaatttgcccccaagaattttttcaccttgatttaagctgaatttttcttgatgtaagaaaaataatgctcgggttaagcaaaaaagtagtttatattaagcagcaaaattcttgatataagaaaaaatacttcttggcggcaaatttaagattctttttttcagtaatatacctgaaaaaattgaattgttcgagtcatctgtaaaaccgtagaatagagtcgtgttcctccgtctgggaaaagacaatatattctaaaaatatcttgggaatgtttgagtgggctgttgtattttgaggggaaaaaatattaaaagatttcatatttctctccttctatcttgaatttgccaaatcatctttttggagtttaaaattggtagtgcaacagtaaaatatagtatgattttttgttttgttatcaggaaccccacctggactgtgggatctgcattttaatagaaaatctccaaatgaaaatagtgaagatcaaatggactgcccaccttccccgccacctcctggtcatgttccaccaccgccacgaggagagggtttggcagcttgatggcagccttcgttgttcaattgggacttacatctaaggcctgttgaatcaactaaataaaatggtcaaaaaagagttttgtaaataagtaccaaatttatcgtgcaatttaaaaaaatactggtaaatttgtttttcaatccccagtcaataatgcatcactttgatttcattgattttgttctctcacttagaggtcccagaaattgaagaaactgtaccattatgccctatctctcagcacttttcacgtttaagtgaacggttgaaatatttggaacaagcttcatccaaagtttcaggatgcacatgctgatcctaggtatcttattcccgcttagttttaaaagcattttttagaatttaacattaatattaccttatgggtgctttattaacctgagttttagattttctctgagttacttaagtatttgtttaaaagagaagagaacattcgttggttatgaagaccaagtcagatgaatgtaggaggtaagattttgtacggaacattataaaagttgcatattttcgctcgaacttgaaaaatgtattaaattatacagataatctgtaaggcaatcatcatattgagcaaatatgaactctcatcccttcaaattttgcacaattgcttatcatgttttgcaagatttcgaagcatttcacgaagatggttttaatgatggggtagcaaagataatttttaaaaaaaggaggaaaaagcagctagatttatcaaagctttttttgtgtttgacaattgtgtattaaatttctggagacaggtttttttttgtaaatatctaggtaattatatgtttatttgtgagaggaatcatttactttatgttaaattttcggaaattgtacataagcgtcaatagataataccttagattatgaacagaaagaccgtgagaataactataatgaagatgcatactgatttcagcacctacaattacagtataataaaatctgattttaatttcctttcacaacagacttcatctttgcgtacttactcattaataggagtatcaggacaaaaattaggagtggaaggacaaaattatctttttctaaaattgaaaggaaatttttttcttctttttttttacacttccacaactaaggggagtcttgatcataattttatattccaacgatctatagatacattagtacctattacttcaatgtcagacggaggatttttttctcattagagttcctcttctaatatctttgaacatcaacgttcaagttgaataattcacatatgtttcatgcaggtgaattatgagcacatgtcggagaattatgttttaatgactattgcaatcaccttgttaaatgccccttttcaaaagaaaattgcctcaatttttgcaagttacgttatcatttgattctactcaacttagaaactaagcaacttccaacgtaaatctgattacaaggggaaataatttaacttactgatacctatttaggtagtgggtagtaattattcaaaagctgttcttatgcaatgtaagctgtcgtaatattctttatgagttgttgaaaagtaaataccccgattccctcaatctgttttaaatgaatgagtcgtgtcctttatttaaagagaatctctaaaaaaaatatagcatttgtatatttgtgtataggtattcatcatcataatcggtctcatcagtctgtagttgtaagtgtcacatatctctatttgtttaatttgagcaagctgaatttaaatcgagtatgaaattgattggtatctagttgttagtctgttttgcaaacccattttgttttgagctaatgcaaagaatccgtcttggtacaccttttcacgactcagcagctatatacatagatggtttattgagcttcaaaacgcacactggcaaatagatacaaaaatggaactacaaaggcaaacaaccaggtttctgttcaaatatatttataactcatgttgaatttgattcaaaactgtcatcgttctgtactgctatttttttcttttttttcatcatgcgctcacttctcgttcttatcttttaaatacttttccctgtcttgtaaaaaaatcgtgcttcgtgagcattgatcggaaaaatgataaataagtacagtctattgtattttttactattctcatgtttagttatcaaatatgaagaaaaaaagtcttatttgcctctagatttaattttcatctggatgtcaattcaaagtcctggtattttatttcaccacgatcatccaataaacttgcaacgagaggcaaagtcactctttcctttaggcatttttcagttaactttcgtttaattccgtctaaatacattctgaaaattaaaaaagacgatgaactacctaattaggtgaatatgcttttgcttttttgcaagcttaatttgatgaagtgattctggggaagttgtaaaaaatctctaaggcccatgtacccacagtcttaaatttggcaagctcgattttcttttcttcagtttgattagtgtacctatcattagtatttttgaatttttatttcctttaattttctaaatggaactttgttgaaattgtaagaaaaaatatttgtgttaacttttgtttactttctacctatcaattgttataggtaactatttattttctgtaaaaatattttaaatatgtcattttctccttttagttattcaaattcttttgtagatacttaacttccttttcttcattgaataataagaccaattacaaattctattcttcctctttgttagtttgggcattggggcaatcagcaggttctaatcaaatattttcatcttttaatcactactttcattcctcttcaatgacggaaatgccaattttctcaccctttatttgaagaaacacatgaatgattagatagttgtcagcttgagatcgctaacttttctacagtctaattttgcacgtggtaatctttaaggcatgcctacccactaggtttgaaaacctgtgtatagagagaacttctaactgtgggagatgtttttaatagtactcataattgtgagacgacccatgtgaatacctttttccttcctatttttccttcagatatctgttcgtccaattatttattacctatatgtatctgtttctattattagttacttttttgcacaatagtgacattaagaggaaaagtaatcttggctcaagtatatttaagagggctatcgtgctatgcagcttctctttgaacagacatccaactcagttgatttgaacgaaaaggaactaagaatcatttaaaaaaaaaaaatgagttaggtaggtgtagttttgagcttcattagccgcacattttctcctgtcaaaaattttaagttcataaaaaatatttcaaatgtgaagctagcattctactttacctctaacatggagttttatccgagaggagtgaaacttcagaactcttttcttcgttctatttaatgttgcatggttcctttctgttaatttcgatccattaatgcatatatgatcatattttgtgaaaaaagataaattgatagaaccttcaaaacaaaattatcagggaacgaaagattggctactcgaacttcaagctgaaatagcctctcataactgtaaaaggtctaataagttcctccaaaaatatttatcacctgtgatacttgataattataatttgtattattattgaaaatatttattatttcttcctccttcattttattttaggtatttccttttgtactgaattaacatccatccaaatgagggatgttcatagtcagatttgtaatgtacagcataagatttaatagaaatctaataaaatggaaatgtaaat

SEQ ID NO: 27 - DNA, 142131 bp, Bemisia tabaci
  source 1..142131: mol_type = genomic DNA
ggagctactcggatcgacctgcttttgaataacatggggtgagttatttgctgaattccgcaatgaacatcgagggctaaggaacgaaaactgcttaactgacaattttggcaaaaattggttggcgactttgctgcattttgtggtataaagtacgcaaactggtgattttaattttttttttaaattccgtaggatagtgccgcaatgacgctgtaatgtatgggaaaattgaaaatctagccttaaaattagaaaattagtgaatttttcttttcaccctacaaaattgtcggtttgcacataggtggtattgttccttggccatcgacatcgtttcatgaggttccgttttcctccttggaaaaaaagggatttgatttgaacagaaatactgttgaatttgccgccaaaaataaatttctattgaatcaagccgaagagatgctttcttcataagaatagtcacttacatcaaggagaaatttgctagatccaagcgggtttattcttatatcagtactcttacagtactttatcagtccattcccaagaaattcagtatctcctcaacagaaaaattcagtacttctttagtatttcaatttgacgagattcaaatactttcaaaaatatgaatttctcgctcaaattgcgacaaaaatgacagggaaaaaaaaagaaaaaaattccgaaccttctagcagaatttccgtacttttgcagtactcccggaccgcccttaaaaaatcagtactattgccggaaattccggacttgtagacaccctggaatacttatattcccctgatgaatccaagtgagtcaacgagtcatctatttcctatgtactaaacaccacgagtaataaaggtttgatagatagtcgcaaaacgcagaaactctgacctaaagttccgagttgattcttttttgagtgtcttaagaaagagaaaaatacaaactttaaatcttctttgcattaaaaaatatacagatcatcactatacagtttgggtttcctagagctaaccctaattggcgctacaccttggtgtttcataccgtagaggagattccgtccatcagctcagggtggcaaaatttcatgaaaaataaaatctcgaaatttcacgtgaaatacttcatgaaatttcagaaatttaagaaaaatattgaaaaatactggttccttttcatgttccgcaaaatattttcttctatttttgtgtgttcaagtgcaggttgcatactctagcccacgaaaaatgtgaaatattttacagctttgtgaaatttcatgaaatatttcacggacatttccaatccttcattcccttcttacgttacacgccaccctgcgtcagctgacgccatacgaccaacgaggaattttaaacgcgcctatagagatttcccccgctttttcttccttttttattgagagttagatttttttcattatacatgcatcactttggccggagttcgaccgaaaaattattcatcaagctattttttggtccgcgcccaatttgcgtgtgaacataatcatggtcctaatatcatattttcggtgagctttcgatgttccctcacctgactcatcctttcgtgaaagtttccacaggcgtcctttcgggcgatatgtcagaccgctaatggacgtaaacaaagccgaaattagttaaggagcattttcccctcgtttcgttcgaagaggagctccttacggtaatgcttgaaaacattacggaggccgttccaacgatgcagttccgtgattatccgcaccgccttcctcaggagaaccgccgtatgaactttcgaatgttgccaaattttcctcaaacaagtatgtaagtatgtaattgtcttagagaaaaattgcaaatgtttttcctcgaacaggataacaagttcttaaaaagccattaaatattttgaacaattaagaaaaatatcgcttaacctcataaagttagggagtgttgcttaaacgcatactgaggggaaccttaaaattctctcttctggctgacatatgtaggtattttttgccgcattaacacgctctattgacaggaaaaaaattaataacaaatcaaacaatcatcatcacacgcagcatctgctaggaagttctcgaatttggcattttagaattgagaattcgcaaccaaattttttatcgcttcatctagaagtacttaaagagctgatttcgcagtttttgataatttctttctgcaacaggaaaaagtataaaaatagatttaaaagtgagaaaatacaccgtgtgtagtgacgtcaactggcagcatttttcatttgaacaagtgtactttggcacataaagatcatttggtcatatctcttcgaataattattaaatttatgaaccgagggtttcctcgtgttcagttcactcggtagtttccacttaaattcgcaatgcatcaaatttcagaaacatgcaaattctctattgtgtctattgactagtgtgcctcaacacctttgttcattgcaaattttctggaatactcgtttaaattgcgaagaatgcttaaaaaattgtaaggaacattttttgaaaaattccagaaaatttgcgtcttatcagtgactaatttggcgacgtcacattgttcatacggcgtttttttttctcaggacagggcattgcggctctcacggttcccacgatgacacgacactataagcggcgaaaagtctaattacagtttcagccaccaggcggcgcttaaattgctcacctagtcgctgtgaccaaacgcgaacgcggatcaattatgtaaagtgcagaaacctgggtctcgttgtctctctatcctcgtttgtcccgtttcctccttccgatcttctccagcctccggcccgcgtagtgccctaattaggcgtcgccttttagggtccattaaggaggctgtgaacttctactgaggacgctccagtggttaagttcccatttcattccgatgttttggagagtgaggagatgtgatttaaggcggatttttgcgagtagatttagctgaatttttcgaccaaatccgcacgaagagcgtttttttctttcgaactaattcactaggctgttgcgcttttcagcaaccatttttagttttttggcttgtagctcgatcatcatcttcctttttttcttatttgatagcttagccagtcaatggcattctattgtattttcgtatacactggaaaaaaaacacattggatctggagtccagactcttaaaaacatcgacatgaaaaagtattcttgattcaatcagaatctatagcttaaatcgagaaccaagcctcataatttaagcggatttcgttttgattcaagcaaaaatccgattgaatcaagagtattttttcttgtcaatgttttcaagagtctggactctagatccaatgtggttttttttccagtgtatttgtattataatttctatgatattttatatcgtagattaagtcgtgttgcaatgaccaactggcgcgctactttgaacctaatccgggaattggcttgttttctgcaagatttctggcatttcacttcaaaagtaacacactgagtcgtaccgctgaatcggagttggttcatgtgtctttttcatccttcccgtatgcgctccatttctgtttcatacagagctcaagccattatcactctctaaaaatactttctaacataccgttcttcaatgccgaaacatagagcaacacacagaggaaatcacgattttgaaagagctatttaagaggatcaaacatgattacaaacagcggaatactttcgaacgtactctgtcgtagtattcgtgtaggctggatgtcgtgatggttgcggcttaaggaagtccgattttttcagcggtgttgcgttagtaggtcgttacatgaaggatcagttttcgatacgcaatactttctactaaaccattaccgagttattatttgtaccttagaactcagctctcattcccatcagatgaattggtgtgtttcaatgttttaatttttgacgaatatttttcagcaggatgtctactaaaacaggctgaccaaaaaccgttacagtacagtaatttttagtactttttccagtaaattcccgaaatattcggtgcctcctcaacagaaaaattcagtactttttcagtacctccatcagtcgaaattcgaaaaatttcaaaagttttaatttctcgctcaaattacgacaaaaatgacaagataatgacaaaaatgctggacctcttgaggaaagtccgcaatttttcagtgcttccggaccgtccttgaaaaatcagtactatttccggactttctggaaatttcggacttgtagacaccctagtcaggacaaaaacacatttttatcaaatttttatcaaatttgtataaattcatcactttttaacgtgcccgatgcggtaatgactagacggtaagggcctatggcctagtaaatagaaaaataagaagaaaagaaaagatttaaaaaaattttgtaagactgttgagcttcaaaacattcattttagaggaggaggttcttaaaaatatttgccaaactggtacgtctgaaatctttcccgtatattcaaatgattaagaaaaagtgaatacaaacccacatgcttgaggtgcgaaaacagggataccagggatttgtgaggagataactcaatgcaattttgttctttctgatcataactgaatttgataaagataaaattaaaaggtagcgataaaaactatgcttacttctggggtgattgataattccatattcataatatcccactctacagcacctatccttccattattcttatcctggggaaggtatattagcgcgatgagaaaaaatattatcacacattgttatcgagttgattcagactttttttatttttacacactatccaaattgggtgttctgaaaagtacccctgctcattttcttccggtacctgtacaattttatacaattagaggaaaacagattttcaaaattacatttatctgtaacgcgatacgagttttttaatgtacgtataaaaatgcgcaagagggtacatgcttactgatttaagtccgttatgagtccatgctcacgacgcaacgtggtgccacataccgactaaattcacaagtgcagtgcggtcgccaaaataagccccattacgataggagtaattggtgatttacagattaattaatgagtgaacgtatatcatgcactatgagtacagtgcatgaaattgaaccgcatccaaaatcatgcatcggattctcgttacagtttatgttcaacacgcgacttacacctgctcccggacgtgaaaagaatgctgcacgacgtgccttctctcacatcgaatgttttggaataattggactacattttgcaatttgaaactaaaatttccggatcatctataaaagcatgtatgtgtgtcgcaggcaatggagatgttgcatgtgtgagaaatttgcgatttgactgttgattctaatgtaaaagtttgcgagaaacacgatggtgcatgctggttttctctgaaagcatctcccaagctcaaaagaagctctgaaagtgaggccaaaatggaggggatatcccactctatcctgagagtccacctctacaccaagacgaactctccatgcaaagatcgggagcaaatacaaaagcagtgttgccgtgctttcaattttagagtccccaaataaagtggcagccctgtcaatgtatttgctcccgatctttgcatggagagtttgccttgatatagaggtgaaatctcaagatagcgtgggatataccctccatttaggcctcaacttgagagctttttttgagcttgggagttgattttagagaaaatcagtggcacaatcgtgtttttcgcgaacttttacgtaggaatcaccagtcaaattgcaaattcctcacacatgcaacatctccattgacattttttgtatcggcatttcactggcaacattgacgataactcagcactggccaccgcgcaggcgccgagtgccatgccgcagcgggaacaaacacgcgtccgttctctgttgacaaaacactgcatctccgagcgttttcaatttgcaatcagctgcttttctctcggagacacttcggcagagacaatctcacagggagacccgaaagttcacggacgctcgaaatgaatcgtcgaggtgtctcagattgaggtctaaaagccaaaatagatttgaagtaaacgctctgaagatttaatttggagacttacggagactcttcacactagattcaagactgcaagaggaaactactcttttaagggcttatatttattcattcttgcgactggagaaaaatttaggtttatgaaaagcggccatttcccggaataacttttcaaggaactaaaacttttcccggaatttttagctattttcgaaatttttcgaaattttctcggaatttcagagcttcccgtcagtttgaacaattttaaaatcaaacttgattattatttctatcaaatatgacgctcttctgagctaaatccgggcatattttggagtttttctgcggagcttctgaaaaaatcagaatttttctcggaacttggagggatccgaattaattccggaaactctggaatctaaaagtaaaatggcagcactggagtcatatacaatacaccaataagtgtttcaattggagaattcatcctatgactcaaatacccgaaagttctgtaagaagtaaaaatatctcattagactagctccatctcataccgaagactttgagttatctgccggtttagaggacaattcaaataacacaattttccttaaaaaataaaaatcttttactaaacaggtaacctatttgtaccagggagctgattattgaaattgatgatagacaaagctatacatcaagaaggcaaagggagtttggagcgattctaatggttgaaacgggtggttgatatggactgagggggaacatgattgagtaccgttaccgtgggttactgttagttagtccattacttacctgttttgtcaattgcgagctttcgcttcaaccaatgggatcgcttcattaccagtttgtcttctttgtcgatccctttgcctatcaatttcaataatctgcccgctgtgcatcggactactaaacgctttcaatatttttgagcattcacctagattatgaagactttattcctctaacatttcaagttttagtgacgcatagtttccagtttgaaagataaaacaccagcaaaattagcaaacatctgctgcaggttaggctgactcccgttaaatcttcccaattcatctgcaaacaaaatatagtagaggtaatcgcgttgcaactttgcaattttttcaccttaattctcagataagatcggtttattggacgtttcaatgaatctatctttatgcaggattgccgtaatatatctaattggtcaaagctctttatacgaaggtccataactggggacagatactttgggacacccagtgcaatagcggccgaccgttcggaaatgcatacattgacaagttcacatgcggacaatttacgacgaagctgaagaaaagtttgcctactttcaccgtttcttaaaaaatatcctctttcgagtaataaagggtccctgtgatttgtggatgagctctcactaatcagggttagcctaaagcgaaggatttgcaaacagatagctataaactatatttgtctgaatgatgtaacattttacggagaactgcggacgctgtgttaccagtaaggagatgtctacatcgattggctaatgagtattgacaatatacaacctcaaaatcttccggaaggtttgaaggtagctaatggttggagagaaacattcaaggagattcgagtaaaattatgcgtgcgcagttcttttgttaaagttttaaaagtttaacttttgaccagaataatttcaaaaaacacagattcttaaaagaggacgttcccttctctacaccacacagtggaacaagtcaatgaaaaaggtagatttgtgtaaaaacttggaatgcttcatatctttgtcaatgcaaaatggagcagtttaaaagtttttccataagttatattgttagttccctctgaggagtacccttaaagttcagaatgtaaatgtgttataaacatcgatatctgcattttttgtcaaatattttggtccaacctctttcaacaggtctgttcactgtgcgccgaaaagatactaatttattaattgggtcaaaatgtttaaaacagcacactggaaaaaaaatacattggatctagagtccggactcttaaaaacatcgacaagaaaaaatactcttgatttaatcggattttagctaaaataaaaaaccaagcctcttaattcgagcgaatttccttttgatttaagcaaaaatctgattgaatcaagagtattttttcttgtcaatgttttcaagagtctggactctagatccaatgtgtgtcttttttttcagtgcatggaagacacgttcctcgaaaaaccgaaacgctcattacaagtttgtcaacggctgcattgaactagtgagaaacattcattttgactgagtttttacttcaaaagcataatatcaaacacaatttccagataattttttatgaaagtttaaaatttatgaagttaaacttcctgcgggtcataaaatattgcgtctttaccattacaaacgatgtatcgtttgtaatggtaaagacgcaatatttacgaaagagtcgaaagaggacctaacaaaaagaagatcacttccaacaacattcgtaaaattttatcgccgcgaatcttcgtcctcgtaaaagtgcgagcttcttttgacccagttttgctctccatccatgacgcaacattagggggtggagggaagggggatgcttctgcgcggcgatccgaattgtcatggacacgaaactagaacctgttgcttgggttgtggcattttattccgttcccccgtaactgccgtgacgtaattacgtgcgtggatacggagcacggggccgtcacgttccctttattccggtccgttcgacttggacgtgtctcgtttgtgcggaacgggaaaactgggcctcgttttacgatattaggattaggatcagccgctaatctgtctattattttttccatttcctttcgtaatccgcttagcaatcgagccatactcctgaatggtattaaacgcagcatggtttaccagtataggacttggagttctgcgattgcaatatgggcatcttatgaaagagattatacgtaatttaactcggaatttagtaagatatttattgctaaacttcaaatatgttgttctcgtgtgtcgattaatagcgaaatttaccctaagatatttgacgaattcagggttttgaatgtttgtcggattttgaatggcttttttttcttttcttttttttaattttataagtttcagtgtctgcacactccataatatgaaagacttaattcgaatgtcaagagcaaaaatttggttgctaaagccgcacgatattagaagttcctgtggtttggagggaggccccccccctttccaaattcttcgtgtgattttccgtagggtctcctagaaaaaagcggtaataactctgcacttctatgggtgtccagcctaaccgaatttcgaagtctaaaatcttgatcgttggttcaaacgcgttcgttttcagcttaatttcgaaacaaagttaactcacacacacttagctctgacgagcaacagtagcagagtaatatctcttacgaactctaccttttctacacatgcgtttaagtctccaagcaaacattcagtcgcactgttcgcaaaaacatgggattatgcacatgttaaacggaaccgacacttaggtatattcgaatgaattttttgtttagaaattctacattttctacacatgcgttaaagtctccgagcaaacagtcagttgcaccgttctcaaaaacatgggattctgcacacgtgttaaacgcaaccgacacttatgtatattcgaatgaatttttaattgattaagaactggtttttatggctcattcatagaacactggaaaaaaaaacacattgaatctagagtccagactcttgaaaacattgacaagaaaatggactcttgattcaatcagatttaagctcaaatcaaaaggaaatccgcttaaattaagaggcttgtttcttgatttggacgtatttatatcaaacggacctaagggggggggggggaggaaaggagaagggggtttggattggcgggtgttgcggaacgcgattctcgctcctcctatactcgcaatgcttttccatggcgcttagttccgtttgacagaacgcgccatccgggattctaaaatcttcaaaaggaactcaatttggcgcttagttccgtttgacagaaatacgtccatttaagcttaaatccgattgaatcaagagtattttttcttgtcgatgtttttaagagtctggactctaaatccaatgtgtttttttttttcttcttcttctttttttttccagttaaatacctttccttcctaagaaaatcgacaaaacatacgttgtttccaaaacgaaacagaaacaacagctactttgctacttgggtgcaaaatgtagtacatgtctgcactctccctacataggttttatatgcaagtgccggcgcggcgccacgagggatcctgaatcgcggggcggcgggtttcctgagcaaagttcaaggccacgagacgctcgcgccggctgaaagttctccgtctggaggcgcgccgagcgtcgagcggttgctcgtctgccgcgtccgcctcgtcgattgtcggttgcaagccgcatccactgcctcttccacaattttctaatgcactttgccggctccgtccgccgcatttccagtttttaactcttcccgggcttcgaatccgcgctagaaacctcgagtttcactgtcgcgaagttgcggatgctgtgttgccgtccggaagttcacttcgggccgtttcagggccggttttatacacagtacgaataggtaaacgacatttgaattaatgagaacgaaaacacaccaattcggaaaaatgaaaatagtcaagacacacacaaaactgcacagtaaatgaagaaattagtctaagaaaatgatttttggtgccgaaagacaagcacttacggacactttaaaggttcaagttggaacagacgcgctaacttcaataacctttatgaaaattgaccgtctttaatgaaagttgcgcattgtcgagttaccaagttggtgtgttttggatctcactgattcattttgtgttaaaagggaagtagaacacaaagtaatctaaacgtgtggtcaatctttttgggtcagtttattattgttgttttttttaaagctatatctgtcgaaggcaattagtcaaattaggcattttatcaaatgtctaggccggtagtcaaatgttgacagtatacggaattctgtgaatttgtggcgaaggattcacgagttttcaagattttgggaagaataactcttcaaatccgcgaactctccttgttccttcctttttacatacctttagtacatttaaatgttaaaatattgaaaattctatattttatgacatgctgaaaatttcatgatgaatgtgcattcaggatcttaaaatcgtttaaaatactattttatgctacacatttttacaaagaattctttcttacaggaacaacgaattattttgtctaaaattaggataagaaatcaaaatttcaatctaagtgaaaatatttgactatctgcttgggcaattaacaaaattcctgatttgactattagccttcgacatagccaccaaacctttcagttgaaaagcagcctcgtcaaaaatcagatgcgagccgccaggatctaactttgatcacattggtgacagtcaaaatattatgggctagccactcgcaaatcgtaatctcggaatctcggtgacatcgagaaataaacggaaatacattagttggacgtatttctgtcaaatggaacaacgtgcattaagacatgagctctgagacccataagaatgcatgcgtaaccgggctcacgtcataatgcacctagttccgtttggcagaaatacgtccagttcagcaagacacttccttcatccccaaatggacgtatttctgtcaaaaaaaattatgtacatcatgacgtgagccctgttacgcatatgttcttatgggtctcagggctcatgtcttgatgcacatagttccgtttggcagaaatagttcaaatgcctcagagttccctacaatccggtcgatttaacaaaaaattttgttcaaccaagtccttttggatcatctgactgaaaaaagggaattagtgtgatccgaagtgaaagtaaacaagtgttaacaattagtaaacaacttcatagtatttccttcataaagctcctccccgtagaaagccccgttgctcagtatttgctgtaattcaacttcagttcagttgtattttacagattcaaatttcagtgtaacctacgctttattctatagcattttaatgtagtccctgcttcacaatacaaagtggcgtataccattgttactcggcagctatgtaaaaacttatcaccgtttgaaagcgcgcctgcgtacacgcttctacgcctgtcactgtttactgggtatcccagcacttaaactcgtactcttgtctcccgcgcgcttagttcttacaaggtcattcacattcttcatagtgattctattccctttcccctccggttgccaaattttggaaatgtttaaactagcgttactaaactagaatattgttcggatgattaaaattgcacatcttccgcacaaaaaggcgtttaaaagtcacaagtgaccgagtcacgtgagacaattagccgatcggacgtttttgtgtgcttaggagcctccagatacacaaagtgcacatattccacacaaaaagccgtttaaaactcacaagtgactgatcccgagtcgcgtgaaacgatccgccgatcggtggtttttgtgtacttaggagcctccagatacacaaagtgcacgtattccacacaaaaagccgtctaaaagtcacaagtgactgatcccgagtcgcgtgaaacgatccgccgatcggtcgtttttgtgtgcttacgagcctccaggtacacaaagtgcacatattccacacaaaaaggcgtttaatagtcacaataattcgtcgcttggctgacataagggcgtaactacacattgagatgagcctggaaaagcattgcattgtatgaagcccagggttcatcgcagattgtagttacgcccttatgtcaggtaggcgacgaattgagggatcccgagtcgtgtgaaacgatcagccgatcggtcgtttttgtgtgcttaggagcctccagatacacaaagtgcacatattccgcacaaaaagccgtttaaaagacacaagtgtctgatcccgagtcgcgtgaaacgataggccgattggacgtttttgtgtgcttaggggtctccagatacacaaattgcacatcttccgcacaaaatggcgtttaaaagtcacaataattgagggatcccgagtcacatgaaacgatcggccgatcggtcgtttttgtgtgcttaggagcctccgcatttggaatttttgcaaccagtgaaaattttatcttcgcgaccgtttgtgacaccatggaggctaaaagtacggaagccaggcagaaatggattacagaaatcctacactgaaaaaaacacttctgttcacagggctcctgcacttttttcgtaacagtcacagaagcttccgttatgaaaacaccgttatgagtacaccgttcccacgaccgaaattctgttttcacaacagaaaaattctgtaagcgtaacaaagaaactgcaggagccctgtgaacagaaggttctgtcgtcagcaccatttatctttttctgtgtaactctcaatgtaagtctaggccctaggttgccgtgatagcgaagagagtagtaagtgcaaaaatgaagggtgctcagaagcttaaccaaattttgtttggtccaaagtttttgtgttccattcatatagtttgtccgatagttttttttgaactaatagtttacttagtccagttataagcaatgacataggtgctgagatcccgccaaataatgaaatatataacccttacgttccgaagccgagtcaaactgacccgaggatctctgaaaaaacgtgccccgcgggtttcatggtgccggtacatccaaactttagacgtaggtcacaaatacgtttttaaacaaagaataagacatcgaattgaaaaaaaaagaaaaaatcaaacatcaacacagccaaaaataggagagacgctttagggtctaattttttttaaacttttctccccaatcaaaacgacaattcattggcagcatagaacagatcatgttcacgcctcgcgccatggcgccttcaattttgcagatacaacacggacatccatcaagcacgaatagttttgtatccctgcgccgtcattaaagcgcgttttttccctttgctccatttccatatagtgttggtttcttttttcttgttaatagtggtgctttaaggggtacgttcgcaaagtagccgaaaataggagagatgtaatcgggccttattttttacctcctctcccgattgtaagcgacttacatcactgacatcatagagcggagcattgcgagtttacgcaccgcgccttcaattttgcagatacaacacggacatccatcaagcacgaatagttttgtatccctgcgccgtcattaaagcgcgttttttccctttgctccatttccatatagggttggtttcttttttcttgtttatagtggtgctttaaggggtacgttcgcaaagtagccgaaaataggagagatgtaatcgggccttattttttaccttctctcccgattgtaagcgacgtacatcactgacatcatagagcggagcattgcgagtttacgcaccgcgccttcaattttgcagatacaacacggacatccgtccagcacgaatagttgtatctctgcgccgtcatcaaagcgaccccttccttttttctatttccatgttgtgttggcttcgtttgtcttatttgtagcggtgctttgagggctccgtgagcaaaacacccaatgtttaacttggattttgtttgccaaactaggtatcgtgtgaaaaaaattggattaagtgtctagctgccaaattaatcaaagtgaaaatagctgtgtgcataagacgtgcatgcacggaaaataatattcgtataattttcccagtaaagtcggtttttatcggaggaaactaggcaacgtccaaaggctcatacggcgtccttcctaagaatggcagagtaacagagagtaacagacattttgtgttcatacgagatgtggatcatcttctgatttaatggagatgttgcatgtgtgaggaatttgcaatttgactgccgattcttaggtaaaagtttgcgagaaacacgatggtgctactggtgatctctaaattcaactcccaagctcaaaaaagctcttaagttgaggccaaaatggaggggatattccacgctatcctgagagtccacgtctacatcaagacaaactctccatgaaaagatagggagcaaatacattgacagggatgccactttctttggggactccacaactaaaaccacggcaaccctgctaatgaacttgctccctatctttgcatggagagtttgtcttgatgtagaggtggactctcaggatagcgtgggatatcccctccattttggcctcaacttgagagctttttttggagctagggagttgatttcagagaaaaccagtagcaccatcgtatttctcgcaaacttttatataagaatcaatagtcaaatcgcaaattcctcacacatccaacatctgcattgtcagttaggtggtattgttccttagccctcctcgatacagtagatttgatcgtaacaacgtccaaatattcgacgaccttggaaggcctccctgttgccgtccgacggtgacggcggttacgtcgtcgtgacgtccgatttaccgacgtcgacgtcgcgtgcgcggcggagcagagaaaccgacggaagtcgaaccggtcattattcggttcgctcggttcgcgcgccgcttgacgcaccgagctggcggttccttcctcccggctccggagatgagcctcgattcggcgcggattcgccgttcgccatccgagttattcgcgaacgcgttatttgttccgcctcgccgatgcacttgtgataaacgaccgaggaacttccactccgagtcggccaagtcggatctgaatacgatgatgagaatatctcggagactccgcagtagagccatgaccagagacaatatattttagaatctccgcactaacaatgagccggttgcaaacttttgctcgagcaaaagcaagagttgatccttataaatggacgtagttctgtcaaacggacctaaggaaggtagaaaggggcttggattggcggcggaatcgggcgtcgagctcattccgtcctatactctcaatgcttttctatggcgcttggttccatttgacagaaatacgtacaaataatatctcaaaaatcacgatgagcgcatcggcaaactctgaaatgagcctgtaaatctgtaaccatcactggaaaaaaaagcacatgggatctaaggcccagactcttaaaaacatcgacatgaaaaaatactcttgattcaatcagatttaagcttaaattaagaaccaagcctcttaatttgagcggatttccttttgatttaagcttaaatctgattgaatcaagagtcctttttcttgtcaatgttttcaagagtctggactctacatccaatgtgttttttttccagtgctgttgcaaacttttgctggagcaaaaacaaggttgatccttataaataatatctaaaaaatcacgatgagcgcatcggcaaactctgaaatgcgcctgtaaatatgtaataaccatgctcaatacggcgtctctaatactgccgtgctaaggatgaacgccgtatgaacattcgagagttgccaaatttccctcgataaaacgagtatttttgatgcaatttaagcatatattcccttgaaatgttcaggtattttaaattaaattgcctgcaaaatagtctgaaaattttgggggaaatattcacaattttcccagagaattcggtatttatcgaaggaaattcggcatttatcgaaggaaattcggcaacgtctgagggctcacacggcgttcttccttagcacggcagaatatatgtcatctctgtttgccggtattctttgtttctggagtcctatttttcgtcaagaagacaaaaaggccattgatcttgaagtttgatcaggggccgaaagaaaagccacgagcctggcttgttgtctactgaggataacacttttctcgattgatctactcatgcataaaaatctacgacaaaatctaagatgcgctcaattcactctcagcttgataactagcagtaaaacgcggatagcggttagactcgtaaagtgcattcaacggacctaatgacacgttcgcatcggctgcagacttgtaatctacagcaccatcttgttctaataacttgattttcctttcaaacgactgcatacagagattatcatatttattgtgtctacttgtgcatgaccgcaaacttacgataggtcagctgtgcgtaacatataatcagttgtgctttgactacgctaagatatagatttaaaatgagtaaaaatgacaaagatctgaccatatgccaatgtaaaagacgtccatcgataaaagaggagtttggagttatccaccaatgtagagcatcttatggtttctccctcttcagctttgtcagtgctgtacatgcagtacccaatgcaagtaggtagaaaactaattgataagtgctagtgcatggtggcaaatacatcatgggatgcactaccacagtggatgatatgcgtcaattttggctcggtggacttgatggcagagttgaagaactcctgcggaatgaccaaacttccttacctgtaacaaaaatgacacagaaactgaaaaaattgttttaacattattgccagtacatcgttgaagacataattaaaagaagagaaagatagattatatattttttcaaacacgtttgcttgcctttcaaggacagttgaaacttttggcccttcaagtgttctttttaataatgaataaatgactgaaggcaaaaaatgcttataaccatttacgacgcgacgttccaaatttctgccggtctttttcttgtaaaaaagaaagctgaccaagaatttttctttaaatgctccgctgcttgacattggttcttgcggaagtccagggtcccatagaactcgtccctggttgggatcgtattcgttctaaaaagatcctcagaccccggagtgagaccctgtgtgattcaaattatttttacggaaggtcaagggagggcatcaacatagcatgccttacagaatcgtaaatacttgttttttatttttttactttttttacgagaatttggtcctaattgaagtattcctgcaaatttcaaattgtgtaagctgatagggaaccctgaaattttgtggtacatcaaatctttcgggagtcatgggccatagctcatagtttagtgggtacgctgaaagattacgtatgggtattttttcgatcatttcattaaaaaaatttcacagccttgcgcacgtaacactggaaaaaaacacattggatctagagtatagactcttaaaagcatcgacaagaaaaaatactcttgattcaatcagatttaagcttaaatcaagaaccaagcctcttaatttgagcggatttgcttttgatttaagcttaaatctgattgagtcaagagtcctttttcttgtcaatgtttttaagagtcgggactctagatccaatgtgttttttttccagtgaaggacacaattgttacgatatgatttttctcgcctccagaactattctcttctcccagcgtcacataaaaacatagtgaaaacgttctctcaaacggaaatcctcatcgagtctccaagtggacggtaataaaatgtcaaatggcacctatatcctggcctctaagcgtgaataggtgtgaagactgcatacctgcattgctcaacaattaaaagttttaatcgaagctgacgcacaatggacgtgcggtttacccgctgggcgggctcttttttgttcctgttcacctaatcgcttaccatcgttgcaaagtttgatcgataggatggctccattttgccttgctttctttgtccattgccttgtctatagatctcaataataagcccacagcacggccgatatgaaacacggtacttacaatttataggaccgcattttttttctcaagtcggaaatcgccgattaaaacttcattaaactttaatgttcttcacgactctttttaagaatcaatttttcccgtcaaatctccatatctcccacatgaactccttaaattggtccatcggtgggccctatcgtcggcattcggcaacgttatcacgatttctttcctccttgctcgccctttgacagacggttcgccgtgttcgattgccccatcgacctattaaaatccgtccggcgaatgacatctcgcaacgcacgcccacagcggagcgcatgaaaagaggggcccgataattaaaaagaccgctcattaatttctcctacgcgtgtgggtccccttgagagcattcgaactttgggccctcggagcttttagttgtcgcaatgacacttttcgtcgctcttttaaagtaagggcatatatcgatttcccgtgagccctgttctccgtataactctaggcttttcagggctcatgttgcaatagagatacgtccttacgtcagaggagtaacgttttgttctgcccgattggatttttcgtttctttccacgcgggaagaaagttcgcgatgaaagccaagctccggggttctttttaatggtgtgctcagcgaaaggcagacagctttctaggaagaaaaggggcccctttgttacgaatgcttagtgcaagttcacatttgcacggctgaaattgaaaattgcgtgacctaatcacaacgttaaaacatttcaattgtgttttagccccttgaaagaaaaccatctgagttccttgcaatcttttgtgaacgtttataaatgagtggaagcagacttgtcctcaaatttttaaaaaatttagttctcaattttacctccaatacctgaaaaactcaaggtaaaatatgaacaccactgtcctcaaaaatgtatgttttaaccggggaaatttggcaattctctgatgctcatacggtttaaaaccttttttgacaccggcatgtttttccttagcataacagtatctagaacccgtccctgtcccaactcttgaacagcacgctggaaaaaaaaacacattggatccagagtctagactcttgaaaacattgacaagaaaaaggactcttcattcaatcagatttaagcttaaatcaaaaggaaatccgctcaaattaagaggcttggttcttgatttaagcttaaatctgattgaatcaagattatttcttcttgttgatatttttaagagtctggactctagatccaatgtgttttttttccagtgggggtatggagcgatcctgttggttgaaatagctggttcccatagatattattgttattaactaaaaattgatgggatttcatgagattaactttcaattgcaatgcaaagtcttcaaagttaaacatgaatccataaatttttcggtgcacatcgtttcaaacccacttcttaggagtccttaacttcggagacttcaacgcacggatacgaaaacaaacttaaaccagactttttttagttagccttcactggaaaaacaaacacattggatcttgagtccggattcttaaaaacatcgacaagaaaacatactcgtgattcaatcggattttagcttaaatcaaaaggaaatccgctcaaagtaaggggcttggttcttgatttaagcaaaattccgattgaatcaagagtattttttcttgtcgatgtttataagagtctgggactctaaatccaatgggttttttttttccagtgcaacgattgcacagctgcagcctgcaacaagtggacaagacagtggcgcctcaatcggcaacaatcgagcggtcggttcactttttcctcggaccaagaaacgcgatacgtgatcatcaatccggcggttcaacaatcaacagtcctggacaaggttgcagttggagaagtgctttctctgctcgttcgctgctcttttcctagttgcacccgccccctcccttcccccagagcgccccctccgccgatggcacttttcgtcacgtttgtggagtgtcgagttttcattgacacttgaaggctaattacgtccagtttcttgttcggaagcccttttcccgtaccgatgacgctgcggcggtcttcggcagggatgccagattgtagagcgaaaatacccaacgtggattaagtagggactgccgtgctaaggaaaaacgccgtatgagccttcagacgttgccaaattaccttacatgaagaacgcaattcctgggaaacttgtggatatttttctcttaatttttgacaggatttcattcactgtttaatctatagtatctgaaaatagggaaaatgtgtatagcttttctcaaaaattaacatttcactggagaaaatttggcaactcttgaatgctcatacggtgttttcttagcacggcaaaataagagaccagcggacaacatatgaatttagcattctgttaaatgtttaacgaccagaattccacgtagaataaaaaccgtgtgacgaaaattactgaaattaactcctaactgagatatcaacgtttttattcaggatgcagaatgcgcgttctccgtattatggccgtaagtcagaaaacgtccttttatcaaaacatgtcttaattactgggttaatttgagctaaacagctttagcaaatttatttgtggaccaagcgtcgaacggaagtcaagaagtggacgaggatgaggttatttttaaagtcgaagggaaagaacacgcatactgccatgcaaaggaagaacgctgtaagaacattcaagagtgccaaatttcccctgataaaatatatattttggaggaaagttatgcatatctttccttgaaatattcagatatttcagattaaattgcagacaaaattgtcagaaaaattggaccaaaaagaatagcaaacttacccagtaaattcgtattttaccgaaggaaatttggcaactcctgaatggtcgtacggcgttcttcctaacactgaaaaaaaattctcgacacttttacgaaggtccgttggtgcctttaccatctcactttttttttacaaataattggtaattttaccaaaacagactggtaagcttacctaaaaaccggtatttttactgttttttcaggtaagaatatcacttttattggtaatcaattcccggtaactttgccattttatctcggtaattataccacagtcgataaaaaatattggcgtttttaccaaggtctggtaaaattaccgagatttctcggtaaaattaccaattccacaatggtaattttaccaagaaaaaactgggatctaatagaaccctgaattcttggtaattttacccttttcttagtaaatacaccgagatttttttttcagtgatagcacggcagcatagcttacaatcatcaaattgatgcgtttcctcggtgtcaaattcttttcagtcttccatcctcatccttaatattcctcgcggtttttacatttttggaaggaggaaacgaatcatcgtttattttcggcgctcattaacctcgttttgcttgagcatggaggttgaaagcctggaccaattaatcagtaccaaaagctcctgagtgtgaggataaagtcatgttaacacattgcgcagcgaaagaactgaaagtggtgagctagtgtattcttcagatgcctgttggtaaaatgaagctttctcatggacatggacattcaaacgacttcagcctcggtgggtcgctgaaccttgtgttttttatttaatattctgaaagtaccgagtgcgtggattatagagtgatttattgcgtagctgaaaatcatctgcgttgctgaatcgttacaatgaggttacatatttcctctataattatggttgaaactaaaccaggaagtccaaaatgatgacacctagtcctacagcattcatacagtgttgtagataggcgctaatatgcgttccatgccaacaaatcgactgcatgcgagaagtattcctagaatcttgcaggcgctaatatacgtttaatgcctgccccactgtgtcgatgatatttttttttggagctgaaatcccggaaaagcccacttttaaaaagctcaaagactagaaggaattttagacgcggcggagcggcggtaaaattatggaggggatgtactacggtactaaaatcgctatatcctctcagttctattgatgttggttaaaatacaacgtatttcaatgtggaattgtttactgcagataacatgaatgagactcgattctttgattctcaaaatatagttataactgttgttgactgttgttcccttataattgtccataaggaattgttgaatccccaaaagtaaaagctttcgcctgtcgccaagaggccatagtggaggacctattaggcgaattttcgcgatcgaatatcattcaccgtagaatgatattcgacgattatgtgcatcttttaaaaatgacattcgacgattatgtgcattttttaaaaatggcattcgacttcctcgttggtctcgccggagaccgtgaaaatctatcaatttgaaattttgaattcacctcgggacttgaattcgatttttgaatttatgcaatcgatgccagaaacttcatccttcaccggaattttttttttcgtaatttctttctgtttttgtgtttggtcgattcgagtctggtgtttttgcaatttgctgtgttttagtgttccatgttttcttattttcttcttaattgaattaaaaaaaaaatctgaactctgattggctcctgctatcaccgatcatcggcatcactcagcagtgatcaattcatttgatgaatgatattcgatcacggaaattcgcttcttgtctctgttcaggattcattcctccattcgacttttacacggggaactggcgactgcgcggtggaagtgcactctagacttgcactaggaggccttgtatcggacattgctctaaatagcaggcgctagctctgcgagtgagccagaagtgtttcaatgtgtagcgattagcccggaatccgggaatctcggagagagaaacgagcatccttgatcttcagcccggtgtcagccgttgctcgatgccgcgataaataaactagtcttgcacccaaccgactgcactggcgggtcggtgcaggtgaatgttgctcatgggttgcgaataattaggaacgcacggtggtcattaaaacggagagaaaaagaatagctacgcacaccgaacacacactggaaaaaaagtcgcttggatctagagtccagactcttgaaaacattgacaagaaaaaatactcttgattcaatcagatttttgctcaaatcaaaaggaaatccgctcaaattaagatgcttggttcttgatttaagcaaaaatccgactgaatcaagagtattttttttatcgatgttttcaagagtctggactctagattcaatgtggtttttgtccagtgcatcagatatgtgctgaaaatcaaaagacaaaacttaccatgcagactgtgttttgcaataacaagaaactagcattgccttactgccaggattgaactacttttttacctctcaagaaatacctaaaacttgaatatattagaaaaaagtaaacatattttctcatgcatattttattcgcatggatctacatcccgttaatttttccaaacgcagggtttgaaaaatggagaatttgctcgcaaattgtttatcgctccatctgacagtgcttgagagctaattttgtggaattttctgagcattgttttctgatgcggggaatagtattaaaatactttcaaaagtgagaaaattcatgacttatcccccaaaatcagcgtttctttaaaactgattgttagcttaagtatttttaacctggaaaggcaatattttcaaacgcaactcgaaaactttccaaacgaatcgacgaataatcgtgtttactttcactgtaattttatagtgggagtattcaaagagcaattatcaaccgaaacgttcacctgcattacaattaaagctgatcgaagcaaagcatgttattttgtgcacgcaatcgattgattctccccatgctgcctaggtgcctaagcttaccgtaatacaacagtggcgtggcgtgctttgcaatatatcgattggtctgccgtttaaatctatggaaaaggatcgataaacagggtgtttgcaacggacacctccataatcgattctttaccggagattcaaatgggagaattaaccattgtcgatcattcacaccttgctactggtttacaccgattacgcaaagcttattagcgagacaaaaaaagcaagttctttgatgctactgatgcatcatcaatcatctccagtgcgtcgagctcgaagaattttacaaacaaaaaaaagatgactggtacaagtgttccgtaatacattcctgggaacggcacctggtggatacattttatttttcatcagttacatttagcaccttaagtgcctcgtccaatactgtcgtgctaaggaagaacgccgtatgagcattcgagagttgccaaatttccaccgataaaacgattattttttaggaaagttattaatatttttccttgaaattttcagatctttccgattaaattgcgaaaaaaatttctgaaaattttgagggaagaatattcaacattttcgcagtaaattgatttttattgaaggagatatggcaacgtctggaggctcatacggcgttcttccttggtacggcaggatatccttacgcttccggattgacgctacttcggaatgacttagaaagagatgaatgctttattttgaggtgtaaaaaagtacatgcatgcagcttggacttccgatttgattacatggttggctggtcgaggattattatatgagacaagcttttagactgatttagtgactacgtcatttgcagatgattaatttttcctcgtaggtctccccccccccacaatttctggctacgctgctggtcatcaatatgtaacaaattgtatcgattgttgtatattttgtcgtcacaatttgtaaaattgtgtgtgccatgaaaattgagcgaaaaatgccggagactttaacgatagggtcggaagacagtcgtgaacctcttaaaaaacgtttagctacgccaatggtgatccagatgtaactattgttgtatattctgctatcacaatttctaaaattgtgcgtgccatcaaaattgtacaaaaaacgccggagactttgacgaaaggataggaagacagtcgtgcaccccatgaaaaatttctagctaggccaatggtcatccagatgtaactattgttacatccgtattctgttttctgtcaacatttgtaaaatcgtatgtgtcatcaaaatttcacaaaagcaccggagatttttacgaaagggtaggaagacagtcgtgcaccccatgaaaaatttctgcttatgccaatggtccagatttccagatgttacgaattgaatattttctgttgtcggactttgtaaaattatgtgtgccatcaaaattgtacaaaaacgccggagactcaaacgaaagggtagaaatacagcaatattcaccccatgaaaacttactacctgtaccaatggtcgtccagatgttacacattgtgtactttttattgtcacaattggtaaaattatgtgtgccatcgacattgtacaaaaaccgccggagactttaacgaaaggttaggaagtcagtcgtgacgcctcgtcgagacaataaaaatgacaaactggggccgcacgctcctcgaagtggcgagccggggaggcattcttccggtcggttgcgcaatggctgagcatacaggtgatccacggacccacgaggtggccattaaccgtttaagaaaattaaagagccgagaagacgaaaagtgcacgacggtgcggtggctggcccgggcctccgtttttaggaccactccagtttgtttggttccatcgcgtgaagcgtgacgacaagtactaagcacagcccccccccccccccccccccccnnnnnnnngttgactagagtgctgccatgctaaggaagaacgccgtatgaacattcgagagttgccaaatttccttagataaaatgattattttttgggaaaattatgaatatttctcattgaaattttcagaaattttagataaaattacaaaaaaaaatcatcgaaaagaaaaaaaagaaattgaaaagaaatcaaaagaaattcgtagacaaatatttaaaacttttcctgaaaattggcgatttgacaggtgaaatttggcaacgcctgcgggctcatacggcgtttttccttagcacggcggagtgggtaccggtacctactgaaatgaggagagaatggggcactgaacaaagtacgaactgagacactctccgttacatgattcctcttcaaaattgtgcactgaaaaaaaaaaaaaaactccggccgtggaagccgtacttacggggtaaatagacataccatccgcgttccgggctcagagccaaaaagttccgggccaagcacccggagtaatcggagctacggctccagcacccggaacttttggcctctgagtccggaacggacggtacgtctatatagcccgtgactttttattttcagtgtacttgaaaaacactggtcgattattttttttctttttatatttgcctgcaatgtttcaattgattcctggtttatttttagcatttattccgaaaatgacctccgtttttctgggtcaactcgattgaaaaatcggaaatttcccttaaaatcgagtttttcagagaaaggtcaatggagaatttgcaggtgtaattatttatatattatttttgtacggccctggacccatcctcctgcatctcatacccaaaatatagtcgttttccggacaaaggaacgtaacttaatgccaaggttgcaaaattgacttaaacaactcaattttttacgaagctgtatttgtgaaattttcatcctgaattttgtctaatttttgaatgagatcaagagaaaaatcagggaaatttttagttagaaatgccccagattctcataataaaaatgcaatttgcgaggagaaatttggcaacattgaattgcagttacgttctttcgtaaggagaacgtcgatatgttagattcaattttaagtcttcctgacagcagctcaaatatcgcgacgttcgaagcccatacgtcaaaaacacgctgctgagagcaacatgcgacggaactcctagaatctagcttcctctaaaattaaaagctcaaactcaagtgtcaataatagagcaacaagttctctcggatcaatgagcgctgtctgtttccgcttagctccaaaaaacagacggacgaactgtaattacaacttcgtccggtaatcaatttgaaatgaattataattgatggtttgtgagtgcgagcagttcgggagatttggacgaatttatgctaaaaagaactatgttacatgcaaaccctgtgcacatagttcctttcagcataaatactttcatttgagaaactaaatcgacgacaggagcgagttaacactttctgttgccttgaagcgaggtgttttaattctcactaaatacaaaaactaacaaggtgaggccaatttctcgaggtgttcgagaggcaggtttctaaaacgcaagttcttgatgcggaacttgtaaaagtattcgtcgagtcttcgcgcttaaaattttccactcacggcagcatccatggcgcattcttcacactcacaaaatatctacatacataaactatataaactatatatatagttttggaagctgaaaatgacaggaatctccccggaaaggttttaaaaatcaagcacataaatcttatgcacaaggttctgactgatttaaattatttttacactttgaattttcgcagaaatacgtaggtgcggacgtgtatacgcgtgtacttgtccaattctgccgtgctagggaagaacgccgtatgaaaattcgagagttgccaaatctctttcgataaaatgttcatttttgagggacgttatgaacatcttcccttgaaattttcaggtcttttcggtggaattgcgggcaaaattatttgaaaaaattgaggaaaaatactcatatgtttaccgggaaattcgtattttatagaagaaaatttggcaacgcctggaggctcatacggcgttcttccttagcacggcagaatgggtcatctatagatttgtgtacaccgcgagcggcaggtctgacaccgagaaattacgaacattgaaggattgaagcgcgcaccgtgtcgtacgcgcaatgcgtgaagtattcattccgtcttgtaggcgctaatatgagattcatgccgaccgcactattcggcttgtatttggcgcaatgcgtgaagtattcctaaagtcttgtaggcgctactgatttctcaataactgaatcgtaatgaattcacataattgactcaaacataatttcaacatgaggttatgtttgtttcttttggtttgaacaccacaaattaattttgcaatttatcgcaattatcgcgattcccccttggcatggcaggatacacctcctttttctgttttacctcttgccaatattcgtaaaaactttcaaaaatatttttgaatattttgaaaacatttttgactattttgaaaacatttttgaatattttgaaaacatttttggttctattgggttcggtttcggtcctacgttcagtcgatcaaatctcactgcagtgggccacgacaccacctccgatttcataacgcaagtcggcgcggcgtccggaagagagtaattagactattttcatgtgttgtgttgccccctccctccagaacccccggggggacacacttcaatccgttcggcgggtgccccgttggatcagacccaggaccccgcggcgtgcgcttttgtttagaaactgccagcgcggggtaattgggttaccgtaccgacggaactggtttgcgtgccacaccgcacggtggaccgagtcaaatggagaggttggacaaaattcggaaactttaaaagcttaaaactccgttattacagtggaaaaaccggggggggggtgggaaacaaggctaaaatacacaattaataaaaaccgagacgttttgactccaaacggagtcattttcagtcggaaatgcgataaaaatgtaaaaaaaaaccgatgaaaacctgagccctacatggtggtggctgggatctgagaaaaagagaaaaatgatcccccgatcatttttctcatcatcattattttttcatttttcattgataattttttttcttttcgatcatttttctctttttcttagatctcggccaccaccatgtagggctcaggttttcaccgttttttttaaaaaaatttttattgcatttccgaccgaaaatgacttagttttgagtcgacacgtctcggtttttattaattgtatttttgagtcttgtttcccgttttcccccttgtttttccactgttatcattgtctcgggctgctcttaaaaatttgtatctccgttattacaagctgttgaggccttcaaaacttttcccaatggttttctcgtaaaatgtgttcgagaaagcccctctcaaaatttaaaatttgacggattaaacatctaaatttcctgtttcagtaaaaaatctcatgtccgacctcttccttcggcacatttcgtcgtttctcttacgaaggaacgtaattacatttcaatattgccaaatttccctttgcatgttgcatttttacgaggaaaatcttaggcatttcttactgcgtatttcactgattttaccactgatctcatggaataaattaacaaaaatttgaaaaaacaacattatccaggtacattcttgaaaaaaatggaattgtttgagtcaattttacaaccttagattggagttacgtttcttcgtgcaggagacgacgattttaactgtgcgccgggccggcgaggaagtctcgggttgagcggaatcgctcgcgggcgccggcgccaacgctgccctgctaaggaaaaatgccgtatgagccttcaggcgttgccaaaattcctttgataaaaaacgaattccctggtgtgaacctataaatatttcccttccaattttccgaataatttgaccgggatttctcctatagttcctttaaatatcaagtagaaataatcatattttccgtcaaaaaatatacattctgcggagcgaaatttggcaactctccaatgttcatatggcgtttttccttaacatggcagaacgccgggtggatcttgccaattgcgacgatcgacgcgttaggcgttaccgtaaatatcagctgatcgccccgcgccggtatcagtgggtcagcggtgaggtcgtcgatgagttgaagaacgactgacgtaacagctccgtcgccgggtaaatgttagtgtgtcacgcgggtgagtcttcttcaaaagaggtatggcgtgctttgcgatatattcagagacaagagaccctccactggcctcctagcgacagttggaagctgttactttcggggtttcaacaattcctcatggacaatggatcactagacaaggtacgaatttaagcattccggtacatgtttcttaaccaaaatttcacgtagaacacgattcgcgcaacgaaaattactgaaaccaactcctaacgaagatattaaccttttcatttcacattggttacgaggaatttgaactgcccgctgacaagaaactcaaagctctacgtgagtcaaatcgcgcacgacaacggtctcagcaagtttcttaatcgagcaatattcatttcccaccatgtgttgttcgaactataggcaatttgctatagctgagccaaagcgtcaagattgaggttgccagatttttacatcgcgcagagactgtcatgataacgtttagcgcgcgatgtgaatcgcgtagagcattgagttttcatgagcgggtggtttgaattcacgcatcaagaatcattaaatatcgttgtgaggagttgatttcgataattttcattgtgcgcatcgtgctctatgtgaaattttggtcacggatcatatatcagagtgctgaaattcgtaccttgtctagtggtccattgtaaggaaacaacagtcatcaccctaatttcggctgttgacctacctacatggtcgatgatgagcttcggatgacgtcatgagccaaacaactttcccaaacgtcggccatttttggcttgtttgcaaaacgaaactgccaacacattgttgaacatcaaccatgtaggtaagtcaacagtagaatgctgaagtcccgaaagtaaaagcttccaccatggccaagatactagtggagggtctcttgtctctggatatacctgtcgcaggcaaaaactaaaatcaggaattatgtgaaatgcctaggcaaatagtcaaatgttctaactcatagattgaaattctgcttcttttcctaatttcagacaaaatatttcattgctccagccaaaaaaaaattctcagtaaaaatttgcacacataatagtgttttaaacaattgttagctcctgaagagacactgatcttgaaattttcagcatgtcgtaaaatacagaatttttggaatttcaacatttaaaaatacgagaggcaattgaagaagaagagacaaacaaagttcgtaggtttgatgagttatttttccaaaaatagtgaaaaatcgtgggctcttcgccataaattcataaaattttgtagaccgtcaaaatttgactatctgccctggcatttggaaaaatgcctgatttcactatttgcctgcgacatatagattgatctgtcatttaaacctatggaaaagaatcgatgaacagggtgtttgcatcaaacatcttaatgatcgattctttaccacggattcaaatggagaaatatcgatagtcgattgttcacgcctcgcaaatggtactctcttacaccggagttaacgaaatttggaaacccaactggaccttgttgatgaattgaatatgcagcgggatgattattggaataggttactaaaccttgtatttttatttaatattctgaaagtaccaggtgagtagttgacgtggtgaattattgcgtatttttagcgccaaaatcagtggcgtggcgtgctttgcgatatatcgattgatcggccatttaaacctatggaaaagtatcgataaacagggtgttcgcagcgaacaccttaataatcgattatttaccacggctccaaatggggaaatatcgatagatcgcaaagcacgccacgccactggccaaaatccaaggtaggcccgctcttaaaaggtcaaacggctcaaagggatttaaaactcgccggaatggcgggaaaatgatagaagggatgtaatacggcagtcaaatcgttatctccctcattttccgctcatgcttgttaagatgtggaattcaatgtggcattgttgcttgtataaagactggataacatgaatgaaattcgattatttaattctgaagatgtatttccgactttcctattccttccatttaagaggagtaaaaggaaatttgacgaagttttagaaacccatgctcgcttctgatgggtgccgaatgacatcattcggtttggcgcgcaaacgaagcgtttttttgcgggaaatgtgcgcttttgaaatgcgtatttctcggtttctgagttaatttttttctgttttcaatctgcgagttgttttctacgcgtcatttactctcagaaagtgtacttgcaagtcaaaccctggtaaaaattggcgataagagctccgtttcaaaataccgtaggaattcttatagccggctaaagaaggatacagaaaagcatatagctggctgtagaatgcggagaaaatcatacggccgggctatacgaagcgataaaaaattatgcagccgggctatagttcctatcgctgggctttacactttatcgcctggctgttgctctttcgccatcgattataaaagcctataagaaattgtgtggaaattcgtgtgctttggaaatcatttagtttgatacggaaccaccttaatatttacaaaacacacattatagtctcctttaatacatatttttttttcatcaattgaaataagaataatccatccatgatgtgcaaacatttcaaaatcatgagttgaataacgctgactccaccagattaaatattagagcctaacacaaagcggagcggcgacgcactggcgcctacaaacctaacagggatacttcacgcattgcgcaacgcgtgaagtatccctgttaggtttgtaggcgccaatnnnnnnnnnnnnnnnnnnnnnnnnnnnnnnnnnnnnnnnnnnnnnnnnnnnnnnnnnnnnnnnnnnnnnnnnnnnnnnnnnnnnnnnnnnnnnnnnnnnnnnnnnnnnnnnnnnnnnnnnnnnnnnnnnnnnnnnnnnnnnnnnnnnnnnnnnnnnnnnnnnnnnnnnnnnnnnnnnnnnnnnnnnnnnnnnnnnnnnnnnnnnnnnnnnnnnnnnnnnnnnnnnnnnnnnnnnnnnnnnnnnnnnnnnnnnnnnnnnnnnnnnnnnnnnnnnnnnnnnnnnnnnnnnnnnnnnnnnnnnnnnnnnnnnnnnnnnnnnnnnnnnnnnnnnnnnnnnnnnnnnnnnnnnnnnnnnnnnnnnnnnnnnnnnnnnnnnnnnnnnnnnnnnnnnnnnnnnnnnnnnnnnnnnnnnnnnnnnnnnnnnnnnnnnnnnnnnnnnnnnnnnnnnnnnnnnnnnnnnnnnnnnnnnnnnnnnnnnnnnnnnnnnnnnnnnnnnnnnnnnnnnnnnnnnnnnnnnnnnnnnnnnnnnnnnnnnnnnnnnnnnnnnnnnnnnnnnnnnnnnnnnnnnnnnnnnnnnnnnnnnnnnnnnnnnnnnnnnnnnnnnnnnnnnnnnnnnnnnnnnnnnnnnnnnnnnnnnnnnnnnnnnnnnnnnnnnnnnnnnnnnnnnnnnnnnnnnnnnnnnnnnnnnnnnnnnnnnnnnnnnnnnnnnnnnnnnnnnnnnnnnnnnnnnnnnnnnnnnnnnnnnnnnnnnnnnnnnnnnnnnnnnnnnnnnnnnnnnnnnnnnnnnnnnnnnnnnnnnnnnnnnnnnnnnnnnnnnnnnnnnnnnnnnnnnnnnnnnnnnnnnnnnnnnnnnnnnnnnnnnnnnnnnnnnnnnnnnnnnnnnnnnnnnnnnnnnnnnnnnnnnnnnnnnnnnnnnnnnnnnnnnnnnnnnnnnnnnnnnnnnnnnnnnnnnnnnnnnnnnnnnnnnnnnnnnnnnnnnnnnnnnnnnnnnnnnnnnnnnnnnnnnnnnnnnnnnnnnnnnnnnnnnnnnnnnnnnnnnnnnnnnnnnnnnnnnnnnnnnnnnnnnnnnnnnnnnnnnnnnnnnnnnnnnnnnnnnnnnnnnnnnnnnnnnnnnnnnnnnnnnnnnnnnnnnnnnnnnnnnnnnnnnnnnnnnnnnnnnnnnnnnnnnnnnnnnnnnnnnnnnnnnnnnnnnnnnnnnnnnnnnnnnnnnnnnnnnnnnnnnnnnnnnnnnnnnnnnnnnnnnnnnnnnnnnnnnnnnnnnnnnnnnnnnnnnnnnnnnnnnnnnnnnnnnnnnnnnnnnnnnnnnnnnnnnnnnnnnnnnnnnnnnnnnnnnnnnnnnnnnnnnnnnnnnnnnnnnnnnnnnnnnnnnnnnnnnnnnnnnnnnnnnnnnnnnnnnnnnnnnnnnnnnnnnnnnnnnnnnnnnnnnnnnnnnnnnnnnnnnnnnnnnnnnnnnnnnnnnnnnnnnnnnnnnnnnnnnnnnnnnnnnnnnnnnnnnnnnnnnnnnnnnnnnnnnnnnnnnnnnnnnnnnnnnnnnnnnnnnnnnnnnnnnnnnnnnnnnnnnnnnnnnnnnnnnnnnnnnnnnnnnnnnnnnnnnnnnnnnnnnnnnnnnnnnnnnnnnnnnnnnnnnnnnnnnnnnnnnnnnnnnnnnnnnnnnnnnnnnnnnnnnnnnnnnnnnnnnnnnnnnnnnnnnnnnnnnnnnnnnnnnnnnnnnnnnnnnnnnnnnnnnnnnnnnnnnnnnnnnnnnnnnnnnnnnnnnnnnnnnnnnnnnnnnnnnnnnnnnnnnnnnnnnnnnnnnnnnnnnnnnnnnnnnnnnnnnnnnnnnnnnnnnnnnnnnnnnnnnnnnnnnnnnnnnnnnnnnnnnnnnnnnnnnnnnnnnnnnnnnnnnnnnnnnnnnnnnnnnnnnnnnnnnnnnnnnnnnnnnnnnnnnnnnnnnnnnnnnnnnnnnnnnnnnnnnnnnnnnnnnnnnnnnnnnnnnnnnnnnnnnnnnnnnnnnnnnnnnnnnnnnnnnnnnnnnnnnnnnnnnnnnnnnnnnnnnnnnnnnnnnnnnnnnnnnnnnnnnnnnnnnnnnnnnnnnnnnnnnnnnnnnnnnnnnnnnnnnnnnnnnnnnnnnnnnnnnnnnnnnnnnnnnnnnnnnnnnnnnnnnnnnnnnnnnnnnnnnnnnnnnnnnnnnnnnnnnnnnnnnnnnnnnnnnnnnnnnnnnnnnnnnnnnnnnnnnnnnnnnnnnnnnnnnnnnnnnnnnnnnnnnnnnnnnnnnnnnnnnnnnnnnnnnnnnnnnnnnnnnnnnnnnnnnnnnnnnnnnnnnnnnnnnnnnnnnnnnnnnnnnnnnnnnnnnnnnnnnnnnnnnnnnnnnnnnnnnnnnnnnnnnnnnnnnnnnnnnnnnnnnnnnnnnnnnnnnnnnnnnnnnnnnnnnnnnnnnnnnnnnnnnnnnnnnnnnnnnnnnnnnnnnnnnnnnnnnnnnnnnnnnnnnnnnnnnnnnnnnnnnnnnnnnnnnnnnnnnnnnnnnnnnnnnnnnnnnnnnnnnnnnnnnnnnnnnnnnnnnnnnnnnnnnnnnnnnnnnnnnnnnnnnnnnnnnnnnnnnnnnnnnnnnnnnnnnnnnnnnnnnnnnnnnnnnnnnnnnnnnnnnnnnnnnnnnnnnnnnnnnnnnnnnnnnnnnnnnnnnnnnnnnnnnnnnnnnnnnnnnnnaaaaaaaaaaaaaaaaaaaaaaaaaaaaaaaaaaaaaaaaaaaaaaaaaaaaaaaattctcaataaaaattcgcaccacacgcaatagtgttttaaacaatttttagctcctgaagagacactgatcttgaaattttcagcatgtcgtaaaatacaggatttttggaatttctacatttaaaaatacgagaggcaattgaagaggaagagacaaacagatttcataggtttgatgagttatttttctaaaaatagtaaaaaatcgtgagctcttcgccataaattcacaaaatgttgtagactgtcaaaatttgactatctgcctaggcatttgacaaaatgcctgatttcactatttgcctgcgacatatcgattgatctgtcatttaaacctatgaaaaagaatcgacggacagggtgtttgcaacgaacaccttaatgatcgattctttaccacggattcaagaggagaaaaatcgataatcgatcgttcacgcctcgcaaatggcactctcttacaccggagttgacgaaattaggaaacccaacttgaccttgttgataaattgaatatccagcgggctgattattgaaataggttactaaaccttgtgttttttatttaattttctgaaagtaccaggtgagtagtttatgcggtgaattattgcgtatttttggagctaaaatcccgggcaaacccgcttttaaaaagtcaaaaggctcaaaggaattcaaaactcgcagaaatggcgggaaaatgatggatgggatgtaatacggcagtcaaatagttatctcctctcatttccccctgatgtttgttggaataaaacttggaattcaatgtgtaattgttgcgtgtaaagactggataacatgaaagagattcgattatttaattctgaagatgtatttccgactttcctattccttccatttaagagatgtaaaaggaaatttgacgaagtcttagaaacccatgctcgcttctgataggtgccgaatgacatcattcggtttggcgcgcaaacgaagcggttttttttgcgggaaatgtgcgcttttgaacgttgcgttgtacttgtgcttcgttatttctcggtttctgggttaattttttttttcaatctgcgagttgtgttctacgcgtcatttaccctcagaaaatgtacttgcaagtcaaacccgggtaaaaattggcgataagagctgcgtttcaaaataccataggaattcttacagccagctaaagaaggctacagaaaatcatatagctggctgtagaatgtggagagaatcatacggccggggtatacgaagcgataaaaaagtatgcagccgggttatagttcctatcgctgggctttacactttatcgcctggctgttgctctttcgccatcgattataaaaagctataagaaattgtgtagaaattcgtgtgctttggaaatcattaagtttgatacggaaccaccttaatattaacaaaacacacgttatattttcctttaatacatattttttttcatcaattaaaataagaataatccatacaggatgtgcaaacatttcaaaatcatgagttgaataacgctgactccgccagattaaatattagagcctaacacaaatcggagcggccggcgacgcactggcgcctacaaacctaacagggatccttcacgcattgcgcaacgcgtgaagtatccctgttaggtttgtaggcgcgccaatgcgtgtttcgcgctggctgccctcctgccacggcgcttgaagcaactatttcacaccagaggtactgcacagtatcatacgaaattgaaggcgctctaatatattaggaatgtcaggtatccttcaaaagtgcggagctttccgagcaaaataaatcaagatactacggcccaaaaatagagcggtagtccaaaaactcactaagtcctagcatccgtaattagtaacatttagcatacactttatcgcctggctgttgcttaatcgccatcggctgtaaaaggctataagaaattgtgcagtcggctatagaagctattggaaatcttacagccggctgtaggtctaaggtattttggaacacagattctactgccaatttttaccagggaaattatttcatggttttagagactcattgagaatccagtgcgctgattattaaaaagacgaaagtatagaaaaaggggcaaggaagacaaagggtaaatgtagcaatcatattggtggtagcgagtggttgtactggaaaaaatgacctgttctctaaggagcaaggtgctctcaacacaggtgtaaatggaaaggtgtaaaagtcaccaactttttaatcccaccactagcgtgactactaaccccccagttatgtcatacgtaatccgcagtcctggattaggattgtggtctcttttcaaacaaatgacactttaaaaacttcccattccgagcttttgctcttcaagccgaggagaaatacaccacgcaagcggtcgttcacgaactaaaagctggtgccatggattaagaaacagtataggaacaaggattacacactccgccgatgaacttatcatggaaacaatggagcttgaacaccgagcattacagcctggttacgaaactgcggttgaatttgatagccgagactcctctcattgttgaatgttcgtactgccttgctaaggaaaaacaccgtatgagccttcgggcgttgccgaatttcattggatgaaatacgagttttcacgaaaactcctgaatattttccattaaatttttcagagaattttctttgtaattagatctagatattctgaaaatttcaagataaaatattcataacattcctcaaaaataaacatttcgttggaggaaatttgacaactctcgaatgttcgtacggcgtttttccttagcacggcagcatagtccgcactctgcaggcatgtcttgtccctgtcagatcgtgcagccctccgacttgtgttaaagagggtgttagaggccctccgtagggaaagttaagacaaatcggctcatggttgtcacaaactggagattaaaaagattaaaaagtttgaaattttcgtaatctttgatccagtcattccggaattcctttcctctattcctttcctcatgcagttcgttccctgacgtgcccctaaattcccggtctactccagtttataatatttgcaatccgaaaaatgtaatcttttttcctgtatgtcagtgctgcagtttcccggaattatgtccgaaaggaacttttcaaataatcggaacttttcccgatatcttcatttattttcggaattttctcgaaatttgcggtttttcgccagtttaaccttttatttgatcaaatttgacgatctacggaactaaatccgggtgaatttcggaattttcccccggagtttcttaaaaaatcggaatttttctaagaactttggtgaatcggaatacggacgggcgcttcatacttcctcgtaaatgtgtgaatttttgagagcgcagtttctaatgacaatcccttctcgtttgtttcagatcacgcagcaaagcatcgaccacagatgcgatcccctcgtgacctcacccggacgatacctcaaatcgcggcggcgatgtcggtcgtgcgtccgggtgtcgcatcgccaaaactccagcagggagcgacgccggtgcctccttcaaccgccggtggcgccacctcgcggtgacactcgcagtgaaagtgttccccggggaaaacgccatgagccatccagcccgggagcacccaacctccaccgcctaggatcgcgacgggacctccattgctcagccatccggcccgagggaccaaaaatcggtcatccggttagaggaactaacactcagctattcggttcaaggaaccaacattcagccatccagctcaaggaacaaacactcagctattcggttcaaggaaccaacacttagccattctattctcggggccaacattaagtcatccggttcgagggaccaaagacttcctcgaaaagcgtcatcgaatcgggatcgttcattcgccattatatctaagtgtctctagaggagagtgtcctggttaaacagaagaatcaatccaatcggctggttgatcagacgataatttccatccggctagatgcgagcaaaagttaggaaaaagcaagctacgaacactcatttacagctgtgtcgtgcggtttagttaatcgaatcacttgaatgttaccaaataactaggcggagatactgccgacttaaattttagaattaaaacgattttagagataaattccgcgagtctgtgatacaaaacgacgtggataggttccatcgtcgcacagcttttaagtcaccgagtacctgattacgttgcgttagtttgcgtgacggtagtttacgttagttttaagttcggacgataacgtatgcgcgcggaaagaagcacgagggcagaagagaggtaaagcagcacttggtctaacaaaataaataatgttaaatacgagcagagccttgtttacgatcagggaatcaaaagaaaatgatatttgctttgatcgcattgagctcagcggtaaaggccggcgtgactttggttggcgcgagcgtgtggttggtgccgttgctgatagcagccatcgcttactatagatacgacatgtttgacccggagagcaggatcaaaaatcaggttcgtatgctgtctgatcagcttttagtatttttttcatcttgcggataccatgtttttaggggaagataaatgaggggcttggaggacaaggcgcataagtgcaatgttttaataaatcgagatattataatgagttcaagtaaaaccgtaaaatttgctaccaaattatcatttttaagatcagttccaacgttctttccgccatatggatccatgtaatttcgaaacttcagtttttcgaaatagcaaaaactctatttattcgccttgtcctccaagaccctcttttgatacattaagggtcatacttgaaatgcgttcaacaatattctcaatttgtaaccccgcccttctctcctatcaggcacccctggactccccccccctcacccaattttgcaaaaaacgcaggcggctgagaaaaagcggtaaagtcaatttagagcgtaaacaataaaaatatcatctcttgactatcgagagtctaaataattcgattacagtagactctggattatccggcgtcgtattatccggactctggattatccggatcgattttgcaaccatgtaactacgtacgcactccgataagtgagcggatccgcggagaagcggtcgcaaggcatattggtgcctgcaaggctgaaggaatacttcacgcattgcgccaaacagtgaggtcggcgtggaacgcattagcgcctactagattacatgaatacttctcgcattacgccaacagtgcagtcggttggttagcctaaaacgcacattagcagccacaagactgtatgaatacttcgcgcattgcgcgctttaatcattgtattgtaatttatcgttgtcggctaccattcacaatcaccattgagtcgtttaatttggcgttaaccttttaaattcgtgttggtatgtacatgatgtatacataataagaatactgtggtgttggttggtggtgtttgtgtttactattattaccggattttttttcatccggatcgggcccggcaccaattaatccggataatccagagtttcctgtacattttgcaataagtcgtgacacgcatctgtaaactgtcctcaaaatatcgaaatctcaatttaagaggggatttgagggtgtttcggctcctgcagtctggccgtttaactttaaggtgattcgatggacgccatattttatgtcagaacggcatgcgctttatcgcatcaattggttccatttttacagctacttgtcagttttctccaattttgagatcgcaattctgttgttaggagactaaagcactcacataccaattttaacaaagaaattcaacgtaataaaggcgtggttttttagagagaaaatatcgcattcgagtgcagtttcgatatcagtatcgaatgcgatgttttctctctaaaaaaaccacgcctttattacgttgaatttctttgttataattggtaagtgagtgctttagtctcctaacagtagcccacagtaactgaaaaaatggaaccaatttatgcgatatagcgcatgtcattctgacacaaaatatggcgtccatcgaatctccttaaccctggctcaccctgtgtagttgcataaaatacattttctgaagaggtcgtttgcatgcttttttgtttttgttatttacgatgaatctaattagactttgtttgcggaaccaggtgcagctaaaccgggagtacgacttcatcgtgatcgggggcggctctgcgggggcggtggtggcgagccgcttgtccgaagtcccccattggaccgttctcctcctggaagctggacctgacgaaacagagatctcagatgtaccctctctcgccgcctacctccaactctccaaactcgactggggatacaagaccgaacctacaggtaattgtaattaaaacgcagcttcttgaaattcggacagaagaaaaatcagggatggagcaccagcgcatttgaaagatttataacagtgcctgggtctaggtcctttcagagagatcctataggaatccacaggagtcttgccttgctgttgagcggcggctcatttatgtgtaaattttaacttgtgttttttgttttttttttttcggcggttgaaaaagggaatgtcaaccccgaaacgtcccgtcaaaattacttttatttacggcctgtaccccgtgttcctctcatttcatttacatattttgggctgattaaattgttacatatactacagagcacatataagtttaaagtcaatcctaaaattaaaggaaatcaattaataaagccacctataatagcaaaaataattcccaaagatgatacataatgaaagtgagcaaccgcaaaataagtatcgtcaataagtcgctccttgaacagctcctttccttaagaaaggaccgtgtggttcccagtggcgcaaggcgtgataatcgactattgatattttcccattgaaagctatactaaagaatcgatgattacggtgttcgttgcgaacgccctgataatcgatcctcttccataggttcgaatggcaggacaatcgattcatcgtaaaacacgccacaccactggtagttatttccgtcatggctgaggaaggtttcaagaggtatttaatatagcagcgtaaagaggacgatttttgtgaaatataagttaaattcaggagtaaaactttggaaatgtatccttgcaagggattacaatgatttgacgctgcaaaaattacaaaaacaaaagatgaaattatataattttgacaaacattaaggtagatacagatgtgccttaaaaaattcaaaatctacaatatattctcttccatattttgtaatagttgaagctgtatatctttgtaatctcttgcaaggatcgatttccaaaattacacccctagatttaatttaaggatcgcaagatatgtctttttcatgctgctattgataaaagtttccttaaatctccatcagtcatgatagaatttctagattgacacgaataacgtaggttgctatctagcagatagagccttgaggaaactttccctgcaaatgacatggagagctaaaaaaaaaagcaatctacgtatccaaagtgtggacataggttgataaaacttcatgtgtactctccaaaaaattgtctaaatatttgacggaggaggtaaacaaaaatgaggaagtgatcgaacgagccaggcatcaacattagttcttcacactttcttcttggtttcacctgtgcgactcgatttgagtgcctcatcttgtgggaaaaaatgccagcaattgcttatttttcgatatattagattaccataacgctactttaaggtgattcgatggacgccatattttgtgtcagaacgacatgcgatgtatcgcatcaattagttccattttctcggctacttgtcatttttttcgaattttgagatcgcgattctgttgtcaggagactaaacaattcacttacaaattttgacaaacaaattcaacgtaatataggtgtggttttttcagagagataatatcgcatttgatacttgttaaaattggtaagtgagttgtttagtctcctgacaacagaattgcgatctcaaaattggagaaaaatgacaagtaactgaaaaaatggagccaatcgatgcgatatatcgcatgccgctttgacacaaaatatggcgtccatcgaatcaccttaagacgtgtgtaaataacctattgatgtatccagattttatatcatgttgttaaaattgggttttccggattttgttttaagttagtaaaaatatactgaaattttttcaggtcgaggctgcttaggcatgaagtccggtcgatgcaactggccccgagggaaggtgctcgggggctccagtgtgctcaactacatgctctacgtcagaggcaatcgccaggactacgacaactgggaagctctaggtaagcttccttcacacctaaatggccaagctatgaaaaaaaaatcccataatcgttcctatgctgccaaatttcttctcaaaaatacaaatactccagaaagatttggaaatatttcttttgaatttttcatgaaagactgaagataaagaaaagactgaagataaagttgcttacaggaaagctcagtctaaagttaggagcctcataacacggaagaagaatgaagcttgggaaagcaactgttctagaattaacacctacctaggggggagaaaaagtgctgagagctggaagttaattaaaggtttgcgtagagacatgaagcgcgacatcgtttctccgatatcacttaaaaaactggaggatcattttaaagatcttttgacggaaaggcgcccagagtttcgagacaacagcacggacaacggaagaatgaacaacttggagatccacacttgtgacataattaaagcggtcaaagagctgcaaaatgacaaagcaccgggtcctggtgggattcctgtcgagttggtcaagtacgggactgccaagctctttgagtgcctcagaaaactgatgcaacaatgcatcaggggtgacgaggtaccaagggagtggaaggagtcttggatcaaggccatctacaaaaagaagggaaggaaggacgactgtaacaactaccgggggctctcagtgaccgggacaataagcaaagtgtacgggaagatactgaaagcgaagatcgaggacgaatggcaggatcacgaagcagaggagcaggctggttttagagctggcaggtctacgatagatcacctctttgttattgtccaggtcattgagaagaaaatggccgtagctcaggaactgcatttaatttttgtggatctccagaaggcgtatgacagcgtgccgttggtgaaactttgggaggccttggaaaaatcgaattttaacggggggttgattgacgctgttaagcgattttataaagggagttttaccaaagttaagtgccatggggggttgtcagcgggattttatgtgactaagggtttaaaacagggatgttgtttgtcgccaacattatttaaaatttatctcgagtgcgtgctaaaagaatggaaaaagaaatgctctggtatgggtgtccccttgggtgatctcgaaactctgtttactctgtgctttgctgatgaccaggtggtggttgctcaagatcaagatgacgcggaatacatgatgcgcaagctagtagaagagtatcggaagtggggtctggaagtcagcatatccaaatctgagaagatgacttttggcggtgatcagcaaagcattgagttggaggatgggcagcagatcaaaggctgcgagcactttaagtacttgggagtgcggttgacccaggatggaaggacggatcaagctatcagggaaaggaacaccttagcaaggaaggctatagcgatgttaaatggaatcctctgggatcagcggatttccaaagataacaagaggaggatatacaacgctgtagtcaaaagtatattaacatacggatgtgaagtttggcagctgaagaaacggacacaggatatgctaagagcaacggagatggatttctggagaaggtcagcaggaatttctaggagagatcgggtccgtaatgatagagtgcgtcagataatggaagtcgaaaatgacatcgtgttcgacgtcatgaccaaacaacttgtttggtatggtcatgtcaataggatgacggaagagaggctgccaaaaaagatgcttgattgggttcctcctgggaggagacgtaggggacgcccagtgcgaggttggcgacagggggtgttaaatgagataagagattgtcaactccctgatgacctgtgggaagaccgagctttgtggcgattaggcgtcgcacagcgccaaagagcgctataaaagcgactcatatatatatatttttcatgaaatgcacttttggtcacattgtgagatttaagccataacaaaaggaacaactttgaatacgaggattgaattttgcagttctagggagcaccaaagtcttcggttctggttcatgaaattttggtcaaggtaaccgaactttcgttatcgaataaccgaagccttcggagaaaaatacgactatcgggatgactagtaaaaagttcagttatttgaagttcctaaaatcgaaactccggttacttggaccgagtgatttagttttccacatgcgttgaagtatttcctgctgcagagaaactgaaaaattcatagacaagctatatcataaacttgccgtttcctagacggaggaacccatctacatttcgacgttacaaaatgtacactcgttgactgtataattacttggaaattgttgggcttttctaacggtaacttacttttttgccgtgtaaacgctaaaatccgcaaatttgtcgacaggaatcacacaattatttttgtgtgtaaactgagtgcggtttgagtccaatttacaaccttggaatttagttacattcctttatctaggagtcgatgagctatccttataattagaattttcttaggaggcaatttggcaacgttcgaatactcatacggcgctcttccttagcacggcagtaaagacctgtacacaccttcgaacgcactttgcatagcaatgaaaacgtggccgtcgtagaaggcatcgattgatcaaaatcaacgacccattggctatgctatgacacgccgtttgcaggtgtgcgtgggccgtaaatcttctgagtagcttattaacgaacggataagcctccgacatggaacgtggaacgatgatagagagattgtatcattttggcgcataggaagagcctcaccgatcttttttgcagatgttcctcgcattcttatagtaaacagcagtggcgaggggtgaatgctcgataatcgataattctccatttgaagctgtggtaaagaatcgattgtttcatttctcgttatcgagcctattacataggtttaaatggcaaatcaatcgataaatcgaaaagcacggtcaccactggtaaacagacgtaatcacacctgagagagcttgttagaatgtaatttctattcgaatgccgataaggtttgactgcatggaactatgatatattagaattatcggacgaaccttaggtttcttgtgcggatgtgttgtgagtcaaagcgtcgattcctccacgaaagtatgtaactaaatttcaattttgccaattttccctctctaattgcatttttatcaggaaaatcttggaaattcctggctgaatgtttcactaattttccttctgatctcattaaaaaagttgacgaattttcggcgaaaattatgcaggtttattctcatgaggaaattaattgtttgagtcaattttgcagccttggagtgaagttccttcgtgccgggaaagaagcatgaaagaggtgaatatcccggagaaagtacgcaaacagctcttctaaaactatgggtagattaagttcgtttttcgcgatcgaatacataattttaaatctcagcaaagtcataagtaatgatcacggataatatatgttacagactccgcgttactctctttccctcttcccaatggagaaaaagttacttataaaagtcatgctcagattcggctaatgatgactgatgaatgatgatcaacgaattgagtaatcgattttgcacacctaacctaatttgaaaaaacttccctgacaaggtgctcatcttgacatccatcagccatcattggccgaattttatttgatttaatgctcatcaaattggtcatcagccatcattcagggaaaagcgttggccaacaactttatacggaaaaaatgcagagttattccttaattatggtattacccctaattgttaagaaagtatgaacatttccaattaattttagaagtatagcaatgcaggttgggattgtaccgcgacatttgggatagtaacctaatttattgggatactaccataattatttggaaatggtcatatcgtcgaacaacccctacctcttttttcggtgtaatttcgcctcaccctatcaaattgctagaatcgttcactgaaaaaaaagattggtagaatttaccattccctcacgctgtatttcacacagcgttaatttagagtcaattctgccaaaagaaaggtagacggtactatgtactggtactggtaaccattactctggcagaatcgacttgaggatcggcagaatttaccattcattcacgctgtgtaaaatacacattctaccaatctttttttcagtgttactgcaggggattctctgttcacgagtcacatcgaagcagacataaattccacttatggagaggataacttttgggttttctaattttgacgtcaatttgacgtcggcgccaaaaaccgattcgacgacgcgacaggcgactcggtcatttacccgcgcgtcgcataagatcaacgttttccggcgtcatcgtcgcgcttccttgccgcattgccaaatggaaccgtctaaatattattaacaccactgaatgaatattctcccttgcattttagttaatgcccaccgaaaatggcaacgctgcgctgtgagtggtgtcgggcgtgactcagcagtctgcggtgtgacgcgacgggcggccgtttacacggccgacaacggcgacgagcgtttgaaccgggcgaagacgacggacgcatttatatgtgagtgcaaagacatgagctgaggcactgagacaggagtccggtgaaaagttcgccgtggagaagacgggcacaaacgacgcacgcattggagagagcttttcagcagcctgattgttgaaattttgtgtttgtcgggtggaaatggatgacatatgggttaaatggcgaggcgtgattggtcaactacgtcttatcgttgctatgtcgtgctttgtccggtggaatggacgacatgctgtcggatactcaagaggtgcctttagtttgtcgtccattccatccgacaaagcgcgacaaagcaacgataagacatagccgaccaatcacacttcgccatttaacatatgattgtcatccatttccacccgacaaacacaatctttcaacagtcaggctgcaggggccttagttttacgaaatggggaatgatgggggagggggggggctgtgtgaggaaaccattgaggatgacaggcttacgggaggaagcctatcagcagcctgatttttgaaattttgtgtttgtcgggtagacatagatgacaaggttaaaagatggagcgtgattggtcggctatgtcttatcgctgctttatcgtgcctgtgtcaggtgaaaacttatgaggtgcctttagcttgtcgtgagttccacccgacataggcacgacaaagcaacgataagacatagccgaccaatcacactccgccttttaaccttgtcatctatgtctactcgacaaacacaaaatgtcaactatcaggctgctgggaggagtatacggatatgtcagtaatgggccggctgaaaacttcagctacagagaaaagataagttattattagtagaaaatagctcaaaaatcacaatgattgatcatcgcaatttcaccaaaggattctgaaaatataaggagaaaatattcataactctcttcaaaaataaacattttatcgtaggaaatttggacggagttaaacaggaaggaaccaagccacatcgggattgaaccgagaaaaagaggtttaaagtttggctcctgcataagactcaaggtaaacgataaacttcaagttcaatttctgcaaaatttgctccaacaaaaacgttatttttggcgatagattgtagtgcagtggttgagttcaaaaccactcataattcaattttttccaaaatgtgggttggttcctttctgcttaactcagtccatttagcaactcccgaatgttcttacggcttttttccttggcacggcagtacacactggtaaaaaaaaaacctgttggttcaagagtgcagtttcttgtcgccggatttaagagtctggactcttgtttcaatgcaaaatccgcttgaaacaagagttcaagactcttaaatccggcgacaagaaactgcactcttaagtcaatgcaatgcggcattggtccaagaggttttttttacctgtgcagagaacacatgttttgtgatcctaaagtcggcaaacatgaagtgacccagtgattgttgacccaacgacgtaatccctcggacctcaaaagtcaaccgaccgtagatggaagcactcaaggagtccgtacttggagggcaccacaccaaccttcccggtaaaacttcaccgaatttactttcccggcgggggcggtgggtttacacgtgaaaacacttgcagacccggagtgcgagcgaccattacgaaacgggccgcgcgccgggtaatcctcgttgcgcaacgcggcggccgctctcggggtcagccgcttccgaagagtagcttcacgctctgaaactcgtacgaaatcgaacgcgcggtttcgtgcgccgctcgtgccgcgcgctcacgcgttacatcttcgctttttacataaaatattgttccgatcccgccatgtcgagccgtgagaaaatccgccttgtatgttgccagatcagcgggctaaatattgaaattgatagacaaaagtattgataaggaagccatttggggtatggagcaatcctgttggttgaaatagctggttcccataaatattattgttatgaactaaaaattgacggaatttcatgggattaactttcaattgtactggaagaaaaacacattggatctagagtccagactcttaaaaacatcgacaagaaaaaatactcttgattcaatcagatttaagcttaaagcaagaaccaagcctcttaatttgagcggatttcctttcgatttaaaaaaaaaaaatctgattgaatcaagagtccttttcttgtcaatgttttcgagagtctggactctagattcaatgtgttttttttccagtgtaactaaaaagtgatgggatttcatgggattaactttcaattgctatgcgaagtctttaaagctgaacatgaatccataaatttttcagtgcaaatcgtttcaaacccacttcttaggagtcctcaactttggagcgtcaacgcatggatacgaaaacaaacttaaaccagactttttttagttagccttaaaaatgatagagttttatgcgttagtgagtgtgttaactagtgagttattttaagagttttcatggagcgatcctgttggttgaaatagctggttcccatagatattattgttattaactaaaaattgatgggattacatgggattaactttcaattgctatgcagaggctttaaagttgagcatgaatccatacatttttcagtgcacatcgtttcaaaatcacttctcaggagtccttaacttcggagacttcaacgcatggatacgaaaacaaacttaaaccagacttttttttagttagccttaaaaatgatagggttttaaagagttttggaccaatgcagaaacattgtgtagctggacaatacaattaaaccaatgtcttttagtaaaggctacgacttctctggagctacgatccatcagagggctaatcgttgaaattgatagacaaagctgcatagacgcacaagacattatgtggatggagcgatcccattggttgaaacggttggttcccatagactaaaagagaaaatgatagaccaactataaggtttcttgtgggttgccgttagttagtccattatctactttctttgtccattgcaaccacccgcttccaccaatagaatccctataaatcccttttgccttctttgtctcatgttttttcttgtccatcaatttcataaatcagcccactactcaaaatttcacgtaaaacacgattttagcgataaacgtcaacgaaaatcgctgacattctcagtagtttttagcttcaggtgaaacagcgcaccagccaagtctaacaaacatgggattgtttaccaaatcagcttcgcgacacgttactcaacaaccaacaagcataaaattgcgatggttcagtgaggtattcccgaaagtcgaagttttcacttatcgccaggacgtctttgttacacaagacaagcgccttcacttttgcaaatactacacgtatatccaaaagacacgaatagttgcatccaggtcttgcgagctttgggagcaagctacgcgcggatttagtcttattttatcaccacaaaggcgttagatgctcctttttggtgcgctggaaaaaaaaaaacacattgaatctagaatccagactcttaaaaacatcgacaagaaaaaatactcttgattcaatcagatttaagcttaaatcaagaacaaagcctcttaatttgagcggatttccttctcatttaagcaaaaatctgattgaatcaagagtattttttcttgtcgatgttttcaagagtctggactctggatccaatgtgtttttttttccagtgctgtttggtgtgcatgctgaagttcctgacctagatttaacctaaagcttaagaatgtttgactttgcactccagtacgtcaaatctcccttaatttttaaactttcaaggtcaaatttgcgttaaaatgtccagattttctccctctgtgcggtggcaccaataaataaacttggaacttttggaatataaggtccatttacacaaatcctgtcacatatgactctggtccgtccaaaatgacccacggttgataacaggagccggaaaaggttcctaggaaaaataacctctgagtgaaattttactgcagggtgtctactacaacaggctagccaaaaatcagtacttatacagtactttttcagtacattcccaagaaattcagtacctcctcaacagaataattcggtactttttcagtacctccatttatcgaaattcggaaaatttcaaaattttgaatttatcgctcaaagtcacaaaaatgaagaaattccggaccttcttgcgaaaattccgcactctttcagtacttccggacccgtccttaaaaaatcagtactttttccggactttccggaaattccggacttgtagacatcctgtactgccgattgaaaaactatcaggcgtggcaacaatgccaattactgtagattatctcccgagatttcagcgaggactcctctaaacttactcgatcggagcgggatcggagaccgacccggaagatccgacgggcgccgcagtgcgtgaatgtgacgtgatgtgaagttttaattgttcttcgtccgatccgattgtcagataaccgtccgtttgtcgcgtgcttctgtttcccgcactttttcgccgcggccaagctgtcgctttaatggcgccactaaaagctcgggctttccaaagctaacttttgcagactcaaaagtgcttccggtttcatttagcgagggataggtgcctggtaccattagaaagttgggagatccctcctagtgaggagaacacttttaattgggctcatatactgccgtgctaaggaaaaacgccgtatgaaccttcaggcgttgccaaatttccttcgataaaatgttaatttccttgtaaacttatgtatattttcttttcgatttttcagataattttgttcgcaatttcacctaaagtttctgaaaatttcagagaaaaatattcatcaatttcctcaaaaatagacatttcagcgaaggaaatttggcaactctcgaatgttcatacggcgttcttccttaacacggcagtatacagggtggctctgacctaccaaaacaggcctttcgtaaatgcccatttttgtcatggttcattctaaatatctaccagatcgattttcatgaatcgaggctccgagagggtgagaagcgcattctaggggttgaaccgcgtattgaccattcagggtggcccacacctaccgtaacaggcctttttttcgattaatttgcgtcgctctaagtccaggatcgcggggatgagtagaaaatcgaccccaaggaatccgaattttatggttccagattccccccgcctccccttgggaggtaaaagggggtccgtgcgtcgcgctgtgtgaaatacagtgtaaaggaatggtaaattctaccaatctttttgttcggtgttacttacaagaaatggaccgcgtttaacagaaaggaactgagccacatcggctgttggcaaatttaactgagatatttaattttctacaagagaacatttgtgcgaatttttttaaaattttaaggcatctgccttgtaacatgcagaaaattcactgaaattttcaaacaaatccgcttcaccgttttcatgtaataaattaaattgcccagctaaatttggcaataactgaagtggcttggttcctttctgcttaacgcagtccaaatatcgatgacgaaaacggtcaattttacctgtaccagtatatagtaacgcttgcctttcttctggcagaattgactctgaattgacgctgtgtgaaatacagcgtgaaggaatggtaaattctaccaatctttcatttcagtgttcctgacaagaaatatcaataataaaaatgttggattttgatggtttttgcagggaacccgggctggagctacaaggacgtgatacactacttcctgaagagcgaggacaaccggaacccgtacctgacgcggacgccttaccaccgctccggcgggtacctgacgatccaggaggcgccctggaggaccccgctcgtcgtcgccttcgtcgcggccggcgaggagatcggctacaagaacagggacatcaacggcgccgagcaggctgggttcatggttgctcaggtgaggaacctctctattttcgggtggagtcccgtagagtacctatatagcgagagtatacagacagatgtgaaactccgagaatccgtcaggccttcaccgatgcctccgcgaacaaatttaggacccagaaatgcagccaaactggaaaaaacacattggatctagagtccaggctcttgaaaacattgacaagaaaaaatattctttattcaatcggatttttgcttaaatcaaaaggaaatccgctcaaattaagaggcttggttcttaatataagcttaaatccgattgaatcaagagtattttttcttgtcggtgtttacaagagtctggactctagatccaatgtggtttttttttccagtgcaacctatgaatttcgaccatccagagtaatttactaatacaattattaggaactgtcgtttataaaacacgtatttgacttggtttttgcataaatttactcatttttgcggaagaacgctcacttatgtacattcttggccatcttggttagaattgaaatctacagactctgcaaactaacagtgaaattttgtgtgtcagagttggttagaagaatggctgcacttttaggccccatgccctccatgaaacgatctgtccatactctcgctataggtgctctagagtccctttatagagagagttgagacaacgccgcttgtggatatcacaaacgggaatgaagattacacaaatcagacggtttttgtaatctttgatcaactcactctcgaattcctgtctccgttccctctctcattccatttgttccttgtggtaacccccatcccccggtccattccagtttatattctttgcaatctgtgaaaatgtaatctttattcccgtttgtgacactgtgaagacctaaaatacgggaaccaatcaggaatggatctttactttcagtataaagggactgtattttagggagggtctcaaaaaaaatgtccaaatttcatcgttgccctgacggaagaacgtaaccacatctcaatgttgccaaattccccctaaattacaattttaccgagagacccaccgacatctctaactgataatttcatacatcatctttttccctgacctcctgtaaaaattagagtgcctacatagggagaggatggacagattggaatatgaagctcgtagggcataaaagagcagccaaccttctaaaacgaagaacacccgaaaaatttcggtgtcaatcttcagattccaatgtcaaaccaaaatggccaagaatgttcaaagatgagcatgagcgtccttccgcaataatgagtgtatttatgagaaaaataggtcaaacgcgtgcttcacaaacgggtcgtaacaattacaaatatgatgaaaaaccactctggatgatttgaattcatggttggctacccttttgggtcctaaaagcttttcccgtgcaaatcaggtaaaatcaggggacactaagggaatgaataaaatcaataattctacacatcatggtttcgtctgaataagctgactctactttacgtagtttatgaacatgtgattcgtgtgacaaattttttacgacatcaaagacgattgccgagaactcatggcttgtgactagtccagtcgaaataaccgatcaaagttgagaaattcgcggcggatctggtcgcaaaaatagtcggtgacgcaagtatcggcgaacaataaactccggcaccccgttgcgcaaagtttgggcaactttttcggcactaaaattgtgagcgctcggtgcgcatagagagagtctcgcccgggatggtgaactgttaaagttgatggcgcgtccgctgtccgtgtccactctgacgcaacgcatcatcaatcatcaacgagatcctcagagtcgcgtcaaccggtgcaaaaaacagatggtttccgagattgctcacttggtatttagggtgaaatatcagtcacagaacattcggtgcattccggtcctaaagcatccggcagtggcgcggcgtgctttgcgatatatcgattgatacgccacttaaacctatgaaaatatatcgatcatcagggtgttcgcagcgaacaccttcgtaatcgattctttaccatagcttcaaatggccgcagtttccgacttgggtcccgttccccaaaaaaatatccgacttgggtcccgcggtcaattaaggagatccgacttgggtcccaatgcatttatgttccaacctaattaagtcccgcgtaatcggcattgaatcaggaagtttgctagtttggcaactatgtaaacgatgaaatgtctcacgtcttatcagattcccagtcattcggccgtgtgatgataggtgttgtttacacaccacatcagtaatcagtaatcagtcggacgtagcgtcggagcagctatggtgtatatgttcagttcaaaaggcaaacagttattagtgattaacaattataaattccgtttccatgaaaaactaagcaaaaacgttgagcggtggtgctgtgcaaatagtaaatgtaaaagtccaaatatttttacattagcaaacgctttagtgaaagttcaaacggaaacgtatatcaaattcaatgatacttccccacccgttaaaccttctgaacaaattaagaagaaaaaattcatagatgaaactatgaccaagtacttgatcaaagaagtaaatcgttttgaatacgttcgtttagtttctaaaaagttccttccgtcgtaagtgtcttgtcatttttagattgttttatttgtactgactaggtcacaaaacgtgaccgttccttgtttccctgatttataaaaatgaataggaacaaatgtattgttttttctataaaagaaaagtaaaagattaaaaagaaaaaagattgtgttgcttctcggcgattccatagcgaggcacggttgccgaatttactaatatcttcctttaacgttaggagtgaccaaagtccattgggacccaactcgatcgggagcaaagtccaccgggacccgagtcggttacctaatcaccgacacgggaccacgggacccaagtcggacgctgcccaaatggcgggatatcgataatcgatcattgacgccacgacactggcatctggatcacttgttacgcattttccgggaatttgaaagatacacattaggaaaacagtaaatcgtcaccttcctgccaaagtatcacaagcaccatgcgacgtttaaaaatttctaccgtaatttaatttttttccagataaattgttggttgaatttgttcgaaaatttcactgaattttatcggcagcacacagaaaattcagtgaaatttctggacagcttcgttgaaaaatttctctgtaaacaaaataaaacggcggcggaaattttgaaacgtcgcatgtcgcttgtgatacgttggccggaaagtgacgaaatgagaggctaagaaacttcattttacagaagcaaatatccaagattgccacagaatttagaaaatgaaaatccctgacaattccctgatttccctgactcatttttgtgaaatttcctgacaaatgaagatcggacgactggctaaggaggcataattgaaaatagtttattaatatattcataactttcttcaaaaataaatattttccgagagtaaatctggcaacattcgaatgctcgtactgcgtttttacgtagcacggcagacaagagctaaccaattgcgaaattttggcgacgttgtaaatcattccgatcgattacgttgaacaggtcaaaattcagagactattaactgaactttcaacactacagccaatgactgcggttcgcgcgcatccaaatatagctgcggctctgaattcagcgggtagaattcttgctgattgctcaccgtcaaaattggcgcaataggttgacatcaattccgtatgaacttcctttccctctctcagaaggtcatacatgactcccaatcagaagattaatcgctgaactgatttgcgaaagcggtttgattgaaaagcagtcgattttatctgccgaaaggcaaacggcagaaaggggggatcaacattattacagttggacgtatttctatcaaacggaactatgtgcattaaggcatgagccctgagacccataagaatatatgcataacagagctcacgtcataatgcacatagttccgtttgatagaaatacgtccaattactacactcatggaactgtaaacagtattcttcaaagactgaaaaaaatcaatacatagataagaggatagttggaatcacgctgagcaaaactgactcattacaagcaattgaaattttacttagctcgtaaataatgtactgtaagtaaattttactaaccaaaaataacccaagaacacaaatatttttatcagggtaatttcacttcgcaatcataccactagggggtttttaagcgctgtacagatttcggcaccgaattccactcctcgatttttaacattgcactaaagccaagtcacagaggaggatacctccttgaaatgtgttccaaagaataacgttaacttcaattctgtttaatttttttttctttaatttgattatttaaatttgcaatttaaattttacaggggacgattcggcggggaagtcgatgcagcacggcgaaggctttcttgcgcccggcgcggcaccgacgcaacctgcacgtcgccatgggtgcccacgtcacgcggatcctcatccacccgcacaccaagcgcgcttacggggtccagttcgtcagggacggcatccaccaggccgcccttgcccgacgagaggtaagtccaaacgatcgagggacactcatgctatcaacccacaatgggtcactaaaccatgaacgaattttgactttcgaatacattttcctgaaggtaaatgacgccccagtggcgaggcgtgacgatcgactatcgatattatccctttgaagctatggtaaagaatagatgattatggtgttcgttgcgaacgccctgaaaatcgatctttttttataggtttgaatggcacatcaatcgatacatcgcaaagtacgccacgccaataaacacggtgtgcacataaaaaatgtgaaggagtaactcagaaaccgagaaatacgtggttcaaaatgtgcatgtttacccactaatttaaaacgccgcgattttaccccgaaccaaatgctgtcatcaggcaccatcagaggcaagcacggagttctacgacttccgttaaatgtcttttcacccctcgtatatatgaaagcaacaaaggagtcggatctgtatcttcagaataaaataatcgaatctcattcatgttgactgtaatttacaggcgacaattccacgttgaaatacattttattttaaaaaacatgagtgggaaatgtgaacagattgcgatttgactgccatgacaaatccctttcatcattttcccgccatttcggcgcgtgtgtaagttctcagagtattgcgggctttttaaaataaaattcacgttttaaaaaaaatgcacggactctcaaagatcctatctaggataactactaaaagaggctagccaaaaatcagtgcttttacagcacattttcagtgcattcccaaaaagttcagtgcctcctcaacagaaaaattccatacttttccagtacctttaattgacgaaactcgaaaaatttcaaaaatttgaatttctcgctcaaattgcgacaacaatgacaaaacaagctgctggttccaacactactgtgttagagagctccccttcgtgaaactattaacatgacaaatttttcacaccgcaatacataaactaaatcatgaataaaacaataacagcaaattcatgcaaaaagaaatttggtgaaattagttaaattgtgataataggaaaaaataaacgagttcaaaaagcagtaactgatttgtagagcgcctcttcattttcttacaattatcacaatttaaccaatttcaccaaatttctatttgcatgaaaagaaggattttccattacactatgtaaccgaggaaactgggagattctccaataagatagcatagagtcagcagtcagctgataattttatcgcaacggaacagcaaaaaaataagacttcagtttttgaaaatgtgaaaggattagaaatgcaaaaatacaagaaaaaatgtaatacatataataattaagcataaaggtgaacacatacacaaacaaattcgtgttggtgtgaatcaagtctgctcggccaccgaaaagtgctgctctctagtgtagcaaacgagtaacaatttaatcctcagttgaatgagggaacggaaatgttcgacgaaggaaaactgtaacccgcgaaaattcaacttttagacgttgaaatcaatatgattttggccgttcctccgacggcaacgagaaccatccatttgttgccacggacactaccaatgctaaaagaaatcgatcgcaaagagctctcccgagtgggcgagctcaaaaatgaaaaaaattccggaaactcttgcggaatttccgcactttttgagtacttccggaccacccttaaaaaatcagtactatttccagacttgtagacaccctgctagctcatataactacggcaacaaggcgagaaacccgaaaaccccggcgcctcgccctggatcattggcaaattggaagcgcgaaagttggaattagataagtttcgggcggcaatttattcagagccgaaatatcggaattagattagtcgccgaaatgaattcgggtgtcaggaagcagacttgcgctgtccgggcgtgtgctctctgtcccagacgcgcgacagacgctcgtgagtatacctggggtatcctgctgttctgcttattatttactttgaatgaatcgattaagatgttggccccccgcctcgtgaactgcgggctcccgaggtccgtgactggtagaataagattacctccctcgttggcagtcgcgtcgcgtggccataaatttgatctacggtgatccattttgtcattctagagaagagagcagttctgtcgtacttaggaagaacgccgtatgagccatcaggcgttgccaaatttccttcgaaaaatcacgaattttcaggaaaatctgtgaatgtatctgcttcgatttttcacagaattttgtccgtagtttcgactaaaaagtctgaaaatttcaaggaaacatattcataactttcctcagaaatgaatatttaataggaggaaatttggcaactctcgaatgttcatacggcgtttttcgttagcacggcagagtaacgcccgattcaaaatcggaaggagggtataatctgtaaaaaggcccctgcatctctgcacagtgagaaaaagtaaccgaagttttgtgtacatttgggcagtagaacacaatgaaaccgaaaagtgcggttattatttggttagttgttctccaggttacactgaataatatcagcgtctgaatgcaactattcgtgttcgtgttgcatacctgaacaaacgaaggcgcttatgaacagcgtgttcataatctcgatacacggttacgtagcacgttgacagtagcgcgtggatcgtctggatgcaactcttcgtgttcagcggatgtccgcgttgcaaacctgaataaacgaaggcgctcatgcgttagcgtgtgttaaaatgggaagtagaacggacaggaacctgaacgtgcgtccattatttttgatacgtttttctttgagttacattgaccaaatctttgggttttaactttggaacctcgttaaagtcagacagaaaacgccaagatatatgtagaaccaggatcgaattaatgatagtccaatgggctattgtgagtttaaaactcacaaagcgaagaagttgtgcggttacctgcttttgggaattctaagagctgcacacacggctaatctgtcgaatgtatcatgagagacgacatccttcatttctaagtttaaaactcataaagcacagaagttgtgtggtaacgtgcttctggagagacccatggctgcatacgcgggtaatcgcggtcgaacgcatcgtgcgaatcgagatctttcatttctaactttaaatctcacatagcgcgtaagttgtgtggtaacggccttttggagattcttttagctccagacacggctaattggtcgagcgcatcaaatgagacgagatcctgtacttgtgagtttaaaactcacaaaccgcggaagttgtgtggttacgtgcatttggagactctcagggctgtatacacggctaatcagtcggatgcatcatgtgggacgagatctttcacattgcgagtttaaaactcacaaaccttggaagttgtgcggttatgtgcttttgcagattcttagggctgcatatggtcactcgcaagtcgcaacctctgagtaacatcgaaagaaacatgaacacatctgttttataggacactttcttcaaaaggctcggagtaacttaagagcttcggtcgatttaaccaaaaattactcgttcaactataagtccattaatttgatctgacagaaaaaaagttaacttaaagtaatcatgaacacgtaaagttttaactgtgtagaacaccaattggactccattttgcgacaagaagctattatttctggttcgttttagaaacaatgtgtgttctattgaaatgattttcctggggtgacagttgcctctatgagtgagccacataaattagttctttatgtttaaaaaaagtagtccaataaagcctcggtccggtgcgtttgacacaaaatcgcacgattttgcaagtggcgcgattattttcttggagactttaacgcacgtttagaaaaggtggaatccgttagaacttctattctaggagagaaaattcaaaacaacccatgaacacggaaattttggactatgaaagcgctttctcgcacctgctagagtatctgtatagggagagtaccgacagatcggttcatggagggcttagggcccaaaagtgcagccactcttctaaccaacttctaacgcacaaaattccactgccggtctgcagattccaattctaaccaagatggccaagaatgtacagaaatgagcgttcttccacgaaattgagtaaatttatgcaaaaactgagtcaaacacgtgcttaataaaggacggttcgtaacaatagtatcagtaaatcgctctggataattgaaattcataggttggctgcccttttgggccctaactttattcgcggaggcatcggtgaaggcttgatggactttcggagtttcagatctgtcggtactctccctatacaggtactctaccacctgcctcctcgcctatctttattgatgactatttttcgcttttgattttcaggtggttttatctgccggtgccataaacagtccgcagatcctgatgctgtccggaatcggtcctagcgaacacctgcacaagcacgggatccctgtcgtggcggacctccgggtcggggacaacctccaggaccacgtggggctcgccgggggcctcaccttcaccgtcgacaaacccgtgtccatagtacaaaatagactccaggttagtccgtccagaagaatatttagccactcagcccggtaatagagtccctttatacccagagttaagacaactcgattatcagctgactggcagccggccttggctggccatggaggccgaaacgagtgcacccaaacgaacgatattgagggataaggatcaggaatcctgcgatgtctgtcgcacaaaaacaacatcaacaaattgatcaattaaaaagaaaatgagattggtttgtgaataatttcttaatctattttcattttggaccgatggcaataacaatttactctcgataaaccacaattaggtaatattttcattattcttgttcactttcaaggtaccgccatcttggtgcactcgtttcggcctccatgagcgagaaccaatcagaattggatttttttttaggccacttccagcccaaccctggcccaaccaaaagtgagttgtcttaactctgggtataaagggactctacccggtaatattcagttcttgcctacgttagagagctgcgtttaaagtacttctctttatgaaaaatttcgagagaaacaagaggattccactggttgttctgaaatcaactcccaagctcaaaaaaaaaaaaaaaatcatgaagttcaggccgtaatggaggggacatttcacgctaagttgagagtctatctgtatatgtggctcaactctccttgcaaaggtagggagcaactacattagcagttggttccaactttggatcctccagacaaagtagcaaccctgcttatagtccagtcaatttagctctaaataagggtcatctgggaaaatccatatatagaaggtttttttgcggaaacatgttgcattaggctaccagaacaacatatcaaaagtttaccaaaatcggccgtccgctaaggccgccatcttgaaaaaagggggggcggggggccaaaatacgccgccggcgaccggtttttagcttatatcttgaaaaatatcgatcccacggaaaaatgtcactgaaccttttaaaaagatcataaaatttcctattagaaacactatacatttatcaagttgcgacttctggttcgtgagatatggcggtagtttcctgcggctaggaaagtcaaatcttccgagaaatcacgttttttcaacaaaatctgtaattatcttaaaaacggcgagtctgaggcaaaaaaaagttctcaccgaaatgaaagagcatgaaatttcaatgcttaaaatgcttatgaattcactagggggtccgcccccggagcgctatgcggtccgaaccaacggcgactactacgcggtgaggctcggcttggccgcgccatgcattgctgcggtccaagatgaaacggcttcacttttttggtaggtttaccgcgagggtaagtcatattatccatttaaatatgtgctaatttcctttcatcatgaacccccccccctcctccccctttaggtcatgcatgttgtatagttaacaaatgtcaacggtcgcgcttgaagataatgttattattttatgatttcttattcaaactaaatttgtcaagaaatcctcctttttcaaagtaactaaaaggaaatgaattaatacaaaatatagaaataggaataagacaagcatttcttcgtttattaccttaagcgctggaatcgtttattaatacctatgtgttgaaaagcatgatggtcttgaaggttcaattgtttttgatggatacgaacaaaaagcgcaacagattctacaaaaagcgttgaaaggtgacgacgttatagctttaagaaatgtcctgccttaattttttgtgaggacactcctttatccgtggccaaggacttgcttctatctatagtgaaaagaataaggcgcgtttgatttgcttgctatcgaaacactttactacagggagtcaaaagttaatgtatctcaagcagaggacgatgcggatactctcattgtaaatgaagctcttagtctgccgagaggaacgaagaaacaagttgttatcgttggtagagtacctatattgagagagtatggccactgggccccatggagagacttttaggacccaaaaatggcggtgctttgttttggtttttgtggataggaggggggtcattaccagcttttgacggttttcaccaaccgcacttgctgccaaccttactacatctaagataatttttctcaaaaattgcacacgattagccttaaaaatatgtaaagaatcgcaatagtgcattcgggtaaatttctcgttacgataagcaaagaaaactacaatttgagtcattttgcatcacattaatttatggcgtccgccatttttgggtcctaagggctccattcagcctaagatggctcagccaatcagaggtggtaacaccggtggccatactctctcaatataggtactctaatcgttggtgaagacattgacctccttgttctaatgatagctttgacgcctgcatcaagcgacgtcctattactcaaaccaggtaagggcaaatatgcagcccaaatttttagctcaaatcaattgcgaacatcgaatgtaaatttgaagaagagcattctgtttatccatgtcgtcagtggatgtgatactacttcagcatttcgtggcaagggcaaagacaaatttattaaactgttagaaaaatgtggcgaagtctcttgtattgctgagaaatttgatgaaaccgactgcactcaagatgagctttgtcaagcgggtgagcaactcgttcttttgctgtatggtgctgaaaaatcagttactgctttgaacaaatgcagatttcaatgttttaatcgtgctttggcaaggcaaaaactgaggtgaaactgcaaacgttgcctccaacttcagatgcgtgcaaacaacacttcttacgtgtatattatcaagttcaactctggagaggaagaaaacggaatcccaaagaatgggggtggaaatcttcggaactcaggcttctccttgtgcctatgctcaacccgcctgacccccccccctcccccaagaacttttacaaatcatctcatgtacatgttcgaaaggctgtagtaaccgctgctcttgtaagagagctggtctaccatgcagtgacatttgtctacattgttccggcttgggatgcagcaatcaagcagaaacactgatcgaagaggaagcagaggatgaatttaaactccctctttctatattttgtattaattcatttccttttagttactttgaaaaaagaagatttgttgtttgacaaatttaatttgaataagaaagcataaaataataacattatcttcaagcgcgaccgttgacatttgttaactatacaacatgcatgacctaaagggggagggggggggtttccatgatgaaaggaaattagcacatatttaaatggataatatgacttaccctcgcggtatatctaccaaaaaagtgaagccgtttcatcttggaccgcaacagttcatggcgcggccaagccgagcctcaccgcgtagtagccgccgttggttcggaccgcatagcgctccgggggcggaccccctagtgaattcataagcatttttagcatggaaatttcatgctctttcattccggtgagaacacttttttgcctcagactcgccgtttttaagataattacagattttgttgaaaaaacgtgatttctcgcaagatttgactttcctagccgcaggaaactaccgccatatctcacgaaccagaagtcgcaacttgataaatgtatagtgtttctaataggaaattttatgatctttttaaaaggttcagtgacatttttccgtgggatcgatatttttcaagatataagctaaaaaccggtcgccggcggcgtattttggccccccgcccccccttttttcaagatggcggccttagcggacggccgattttggtaaacttttgatatgttgttctggtagcctaatgcaacatgtttccgcaaaaaaaccttctatatatagattttcccagaaaaatgctagattgactggactattatgtattttctccctatctgtgcctggagagttggaccagatagaggtgaactctcagcatagcgtgaaatggcaatttcattacggtcagagctttgagagctttttgagctcgcccactcgggagagctctttgcgatcgatttcttttagcattggtagtgtccgtggcgacgaatggatggttctcgttgccgtcggaggaacggccaaaatcccattgatttcaaggtctaaaagttgaattttcgcgggttacagttttcctccgtcgaacatttccgttccctcattcaactgaggattaattgttcctcgtttgctacactagagagcagcactttccagtggccgagcatatcatagcatgttgctatggttttatatcaaataacctaattgtatgttatcatcctcttatcttttcaatgcagtttttgtgtgcagttgtacttgcaattgttattatttcttaaaataaaaaacatggtgacctcgacgtgatttaataatttgttcaattaattttaagttactaagactaagattgagatttgcgcataattaatggataatccttaagattgccgttattggtaccatagaaggttaattaacctcaaaataattgcatgcttgagagctcggttgagactcgcattgggatcctttcagagtttgtttaaacctcatattaagaatgctttaggattcgtttgagcccctcgcatcaagaatgcttgggaattcgtttgagcctcgcatttagaatgcttgagaattcgtttgagcctcgcattgagtttctttagagttcgttttaaccttaaaatacagatgcatgaagtgctctttcgagctccgtgctatttatagtgcgcgaggtgctccattgagccaccccatacctacaaaggcgtgatgtgctccattgagccactcgcatacaaaggcttgaagtggtctctcgagctccacgctaaaattcaagtgaattccttttcagctcttagtgtataccataagtattgtgtaagaattatggcagaaacgttcctccaaaccgtgctaaattatagtttctttgaactctgtgccgataaaaattcagaattccagactgccagcttaacaaagtataaccttaattcaagttggcgacttgatttaaaaaaaaaaattaaaattaaatcatatgatttcattacattgttgacaagttaagaaaaagcttatcaacgatgaaagccagaaacaaaaatgcgatggcaaaaatagccattgcaacatttgccgcaaaatcacattcataaaagataattccatttctctctctttatttctctttatttattgtaatgtgaaaaatttgtcatatgaaattacgtcataacattttgcatcggcatgtaacctctgataattgggtaaagattcatttaatacaaatacaatttcagaaaaaatcattaatagttgttaatagtttcccaaaggcgagctctccaacacagtagtgttggaaccagcagcttgtttgagcttgggaagtgatttcagagaaaacatcgtgttcctcgtgagatgttatatgaggaaaattactaaaattgccaatttctgacacatgaaagaattccattgaaagaactgaagtctgtaagtgcaaaaaaatttcgaggcgaaaatgaaacatgagtttcctcttagcgcgaacttgttgaaaacaaagcgacggttgcgacaaacaattaagcaaatgaaacggggaccgaatgtataagcctattgttcgagttcacatcgagagagacaaacatgatgtcaagagctccgcggagcatgtcaccttccttccgggttcggccctcttgatacggcaataccaacgcttttccgcaatttctaaattcctggactcggattgtcctacctacccgtcctgaagggaatgacaaagagaagttcgaaagcttttttatctcgttttattcttgatcttctgattagctgccactagaaaaaaaacacattggatctagagtctagactcttaaaagcattgcgacaagaaaaaatactcttggttcaatcagatttaagcttaaatcaagaaccaagcctcttaatttgagcggatttccttttgattcaagcttaaatttaattgaatcaagagccctttttcttgtcaatgttttcatgagtctagactctagatccaatgtgtttttttccagtgtgtggagtttaaaatgagcaaaatttttatttttcatcagttcatagctaataataacagtgattgcaacttgttacctctaggtatttcaccgcaataggggaaacggcttcgtcttacagtgaactaaaatgtgaggggcgaaagagttcagcagaaaggaaccatgccacatcagctatcaccaaatttaataactagcaatttttttttttacgagaaaacctttcagcggattcatttgacaattttaaggaatttgcttcatactctgtagaaaattcacaatagaattggcacaaaaatccgcacaaccgctttcatgtaaaaattaaattgcccaactaaatttggaaatagctgatgtggcttagttccttagtccttctgctcaacgcgatccaaatatattatctccgtttccaatactgccgtgctaaggaagaatgccgcataaacattcgagagttgccaaactttcttcgataaaatgtttatttttgaggaaagttacgagtgtttttccttgaaattttcaggaactgtaggtgaagttccgaacaacattatatggaaaattagaagtaaaatattcatgagtttaccaggaaatttgtgctttatcgaaggaaatttggcaacgtccgaaggttcacacagcgtttttccttagcacggcagaatagtccagtaaagttctaccaagttctctagaacatacacggaggaaaaaacttcgtgcgtgggacccgaagtttaggtcatatggatctctgatgttttcggattgagcatctgaacactttaggtccagctgctgaggtttggatcacacatctgaaacttcagttcttacacctgaagcacttcggttttcacatacgaaaaacttcggttctcacatctgaagttcttcagatgtaagaactggagtttcagacgtgtgatccgaatttcgacagctaaagtgttcagatgctcaatccgaaaacttcagagatccaaatgacctaaactttgggtcccacgcacgaggtttttttctccgggtacgtggttaccattcgattctttctcacgtaatgattttcctttcctgttttctccaggcggtcccggtgacgatgagctacgtggtgaaggagcggggtccgatgacgacactggggggcgtcgaggggctggggttcgtcaacaccaagttcgccaacgagtcggggttgtacccggacatccagttccacatggcccccgcctccatcaacagtgaccagggctcccaggtccgcaagatcctcggcatcaccgaccgcgtctacgatctagtctacaaacctataggcagtaaggactcctggactatcatacccttgctcctcaggcccaaatcctcaggtacgtactcgtgaagaacactcgatagctcacaaggcttacatacacgctcaaatttccggcaatttccgatcaaaatgatgacaaaaatggcggtcaaatttttgcaggccgcaaaaatttgatggtagatggtgcgcaccagtcaccatttgatcggaaattgatggacatttgagcgtgtgtccaggcctacagaaaaacccggttttgtgctcattcgccagggtgtctagcgaccgagagacccgggaaatgtcaaggaacttttttgacggtaaattggatttatttttttaaccaaattgaaaattttgttaaaattcagcaataagctgaaaatctcaatacagagggaaaaagctcacacacaagcacaattttccctcaaaaagatacgctgtttggtgcaacacgtactggtgacaaatttttttgggtgtcaggggaatcagggaaaatgtcagggaacttgcaaaacttcggcatgtcagagaattgtcttaagtaagcaattttcgtgtcagaaaagcgtctgggaaatcaaaaaacacaattttttcggagagtgtttcgcgaatttgattctggccgagatttacatttcgcaataaggaaccactatttctggctcattttaaaaacaacatacattggtttccctatgcagatatgtgcttttataggacagccagagatagtgagtctgtattataaaatgtaatccttatggtcttaccttgaaattgtccacgttgtcgcggttattaaaggtaaaagagaggcacacaagagaaagttggcaggaataggcgcacaaacctggaaccaagaaaaaataaaatataattattataaattatttttctgaacactgggacttaaagtaaaacaaagtgaaaccaaaacaagtgcaacggcaaaatttcaagaaataatgtacagatcaatggttgtcgatgtccaatgatgtctatgtacgtcaagaaccaaacaccaggtggatcgcatttagcaaaaaggaaccagcgcgattgtacagtgttgtaaaaatgttgcttcttcataattatcaaaaaaatctctcagatcagcaagtactttgtgcttcccacctgaaagttgttaattttaaaggaaaataattgtgtaaattttaacgctgtacacatattgagtattcgtaaaaggaaggaagaagttgcaccattttgaaaacaccgtaatcgcgctggttcctttttgaaaaatgtgatccaggtggtgtttaccatacttttgacgaatacgactgaagtaacgatatttgctgaaatagaatctgttgatgaatagaatctgaattattccttgaccgtggcaaccctgcatacctttcgtcagtgaatgtattattctccgtaagtaacaaatttttacaccgaaaaaaagtgaagttgatttcacatttcggatgtaaaaacagtgtgcgagaacttctaaaatgctgaatcacccgctccagcagttactttagcaatgccaagatgtaaatctaactgctaatggcggataattcactggaaaaaaaacccattggatctagagtctagactcttaaaaacattgacaagaaaaaatactcttgattcaatcggatttttgcttaaatcaagaaccaagcctcttgatttgagcggattgccttttgatttaagccaaaatctgatcgaatcaagagtcctttttcttgtcgattttttcaagagtctgtactctggatccaatgtgatttttttccagtgttcagcattttataagttctcgcacaattttttacatccaggatgtcgattcaacttcacttttttttcggtgcgggtcgaaaaatcacaaaatgttgttaaaaatcgaccatttctgcccgatttctctcctaggacaagtatcgcttataattccatggacactattcacggcactttacgaaagaagcgtcccgggtacattctagccggagtttgatttattcggacgtatttctgccaaacggaactttgtgctttaggacatgagccctgagactcataagaatacatgcataacagggctcatgtcttcatggacaaagttccgtttggcggaaatacgtccatttggacgtggatgggagcacgttcggttgatttctcggggtgaaactgctcgtatttttagcgtttcgggcagggcggccaggcagcgagtgaggagtctcaaagcctccgactcaaagagagcgcggattcggaagaggcgcaggcgcgaactgaaaacgaaacggctcccgactacgtgcgcatgcgtcttcgcaggtatgcgcgcgggcaacgtgcgtccagaaacatgtctgtcagatgtcactcgaaaaccattcgggttttgcatacagtaaagtacagggaggctacgccccctgatcacaccgcgggccaaccccatatacgaaacttggacgtatttctatcaaacagaattacgctggaaaaaaaacacattggacctagagtctagactcttaaaaacatcggctagaaaaagtactcttgattcaatcagaatctagcttaaatcaagaaccaagcctcttaatttaagcggatttcgttttgattcaagcaaaaatccgattgaatcaagagtattttttcatgtcaatgttttcaagagtctggactctagatccattgtgttttttttctactgagggaggctacgctctttgatcacaacgcaagccaacccatacgacacttggacgtatttctatcaatcagaacaatgtgcacactggaaaataaacacattgaatctagagtccagactcttaaaaacatcgacaagaaagaacactcttgattcaatcagattttagcttaaatcgagaaccaagcctcttgatttcagcggatctccttttgatttcagcttaaatctgattgaatcaagagtcctttttcttgtcgatgttttcaagagtctggactctagatccaatgtgttttttttttttttttccagtggaggctacgccccctgatcactatgcgggccaatcccgtacgacacttcttcgcgccctttgactcccgctataccgacttcgtcttatcggttgggggccgtccctaaattacgaaacgcgctttttcggcattttgacccccaaatttaactttcacttcgaccgaataaattgcttacattatatggattacattttgcaatatggaaccactatctacagctcttccacaaacgcaccttcctgtatagggaaacctcatacgtggtacctaaaatgagccagaaatagtggttccttatcgaattatgtggtccatatgtagatgcagggtctctaaaaagcactgtttctgattgccacggtacgaatcacacgaataaaatgggtcggttgcgctggtcacagaatcgtgttttgacgtttgatccttgtagatcagttaaaaataacaagaatcgtctaaacagcaactttctacggaagataaacctaaatatcgccccttgaaaagtcgagtttttgacgtcattcaccgcggtagtgacactcttggtttcttcctccttgctttcatcaggcggtatgtgacgcacatttgaattgattgttcaatgtgaaactcggatgaaagcaagatggaggaaaccaagggtgttgttactgcggtggatgacgtcaaaaacttgacttttcaaggggtgatatctcggttaatcttccgtagaaagttgctgttcagacggatctttttatttctagctgatctgcaagaataaagcatcaaaacacgattctatgaccagcgcaactgacccattctgagctcctcgatagggtaagatgaaaatcgatctggcatcaccgaggaatctccgcgatgcgtgagaagaaaaagtgtcagtagttgtccaaatccggagtccgaaaaattcaatgaattggatagctccaaggaactgcaagttgacattataaatcataacacactgcatgtatgaaaaattctattattttgtaaaagaggatgtgcgattcggaccgaaatcggcctctccatggaatcgggacgtttttggatatttggcagttgacgatgcgtagtttacagaaatagtcgggttttgccgatactcacatttttttgcttcagcacaggggactaaatatggctccggagcccaaaatcacggtaaattcgcgtttttgaatgttctacctcagattttgctctagatccaacagtaactggtcgagagcttcgaagatgctgtgaaaggcacataaagcctacgggaatatggccacctctcaccttggagccaaagttcaaaatcaaacttttctaactttttagccaaaatagttggaaattcatgtttttcggggttctaccctagctttcaacctgagcccaaaggcgacaggtcatgagcttcgaagatgttgtgaaggaggcttagagacgtagacgtgaaacacgaaaatatggtcacctgtcacctttggatccaggttgtaatctaaggtagaaccgcaaaaaacatgaattttcagctattttgggctgaggagttaaaaaagttccattatgaacttagacccgaaggtgacggatgaccataagtgacccaacaatgcaggaaaaaataaaggctaaaggtaaaagctaaaggtggtatggaaagaaataacactcggaggacgcttttagatcacctttatgggcaaggtatcataccgaactgaaactgagaaatggaaaactggaggaatcaaaactttacaaaacagctgacgcttttcgccaacacgccccctaaaggctaaaggtaaaagctaaaggtggtatggaaagaaataacactcggaggacgcttttagatcacctttatgggcaaggtatcataccgaactgaaactgagaaatggaaaactggaggaatcaaaactttacaaaacagctgacgcttttcgccaacaaaaaactcattcgtttagcaaatcctcgttatgagatgacgtttggataatacttcactcttggatggttgaaagaatgcaatagttcaaccatccacgagagacaagagtggaagagtggaggatattacagaggaaaaaatcgatcggaaatttccttcgatggctccagagacaaatatcgcagcgtcaaagtaagttggtttgccgatagtcgtcattgaaggcgaaacaagtcaactcattcacgagtagaggctcagctctcgagggctttaattactcgtatataacgtcgatcctctaacgtaagggcgtatcttatttcctacatgagccctgttttacatataaatttatgctttctagggctcatgcggaaattgacacaggcgtgacgtgcttcgcgatgtatcgattgatttgccatttaaacctatgggaaaggatcgataaacagggtaaccttaataatcgattctttaccatggcttcaaatggagaaatatcgataatcgatcattcacgcctcaccactgggaatcgagatacgtatttacgtcagaaaagcgacgataatcagcaaaaaatcagacaaaaatcagcacgcattgatcgcttcggatgttggctagcaaagcccgcatatttttttgaggccgggtttattctaggactgcattttgcaattaggaactacaatttgtggctcattctagaaacaacatcggtgtcattagtttccactgcagatatgtgttattatacatgaggaagaaatagaaaatttcaaaaatagctggaaatggggtttcaggacattttgtcaacgattttttgtccgcgcacctttgatgtccagtaatttacgcccacacgtaaaataagcaatagtgactaggtccaagcgttatattttatgcgcgttatatatacaatatggaaatgagaaattgagagagaaggaggtgttcttatggttgctcattttctaaatgaaatgttattactttctccttttgaatcatctttttaaattgtcattggtgaatatttggttttatttctatccttaaaatattcgatgtacaatatcccacctataatagttacccgacctatgtcgtcaattctttcgattacgataactatcgttagatttacgttaactgattcaaattttgtaattttgtccattttggtcggatgaagaactgtcttgattttttttaaaattttttctttacgaaattattacttcattttgaaaacatttataattttaaaacatgacacatatttgtaaaaccttttccaagcgaaattaatctcaacgagccgcagttgtgccgacggaaactgcaaaaatgaatacaagaggaaacaagcagtgaactccaacacaatgtgttgataaggcgcgtcattaactcgcacatatcaacccctttagttttcatttacagagatttcaaaannnnnnnnnnnnnnnnnnnnnnnnnnnnnnnnnnnnnnnnnnnnnnnnnnnnnnnnnnnnnnnnnnnnnnnnnnnnnnnnnnnnnnnnnnnnnnnnnnnnnnnnnnnnnnnnnnnnnnnnnnnnnnnnnnnnnnnnnnnnnnnnnnnnnnnnnnnnnnnnnnnnnnnnnnnnnnnnnnnnnnnnnnnnnnnnnnnnnnnnnnnnnnnnnnnnnnnnnnnnnnnnnnnnnnnnnnnnnnnnnnnnnnnnnnnnnnnnnnnnnnnnnnnnnnnnnnnnnnnnnnnnnnnnnnnnnnnnnnnnnnnnnnnnnnnnnnnnnnnnnnnnnnnnnnnnnnnnnnnnnnnnnnnnnnnnnnnnnnnnnnnnnnnnnnnnnnnnnnnnnnnnnnnnnnnnnnnnnnnnnnnnnnnnnnnnnnnnnnnnnnnnnnnnnnnnnnnnnnnnnnnnccccagaatgagaaacaactttaaatcataattattgatggataaataaactttttacacgctttggaaaatctcagaagttcgcggtagtcacttttcggtaaggaactaagggactcggttattgtatcgagcagggttcgaaacgatcgcaaaggcggtatactacgtatacgcgccaaaaaaccaagaagcacgcaatctttagttttaacccatttgcacattgatcttttagagtcaaatacgtcaaattttgagcgttgggttgcgcgttcacctcgctgcagcacaataaaagcacaaaatgtgaaagaaaaaattaaaaagctttggaaattattaaatttaacacggaaccaccaatatttaaaaaacacacattatattattattctcctttgataaattgatacatattttttcccatcaatttaaaagagaataatcaatgcagagtgcgcaaacatttcaaaatcatgagttaaaaacgctgactatgccagtataaatattaaagcctgacagagcggagcggcgtgctgccagcgcgagaggctcactagcgcctacaaacctaagtggatacttcacgaattgcacaatgcttgaagtatccacttaggtttgtaggcgccgatgcacgttccgcgctggcctcctttgacaggcatcctttaaacgtacggatctttcctcgcaaaataaatcaagatactcatcgtagacaggaaaatctaagagcctttagctgaggcaaatatagaggtttatccagttcaggtataacaaggtgggactttcttgaaagataattaagtaaagaggtgtagagagttttagtgaattttgtcgcatggaactgaagctcccccatttttaccaaaactctcaactatatattgttctccgttggaccaaacagacaaaacaaaaaaacaagaaaaccctcatccttccaagacatacattttcattcaaaaacgtcgtgagcaattgtcatttgtatgaacatgtgggccaattaactttgggtctcaaccggcacgtggaccaaaactcccttgccgaaaaaatgcgtgcacgtaaattactggaaaaaacgggtgcgaggacaaaaaatcgttgatgaaatggagaatttgcacacacacattttattgcttcatctgagagtgcctaatgagctgagtttgcagtatttttcaaaaaaaattctgacatgcgaaattggagagaaatagtattagatgagaaaatgtgccgccttatgacgtcatccggcgccattttccatttaaacacatgtattttagcagattaggttatttcgtcataatttctccaataattgctcaatttggagaccaaggatatcctcctgctcagtttttctagtagtatcatttcaaagatgaaattcacaaaatttaagacacctgcaaattctctattgaagatattccgagtaaagttccgacatttagtattaattccgggaagcagcagcactttcaacgagagtctattaccataaccgaaaagtcgatcggtggcatggacgttatgccggacggatccccaagggtaagagtgtagcaagtgacgtgccgtcaattaggagcctgacgtggacaccgggtctgttgcataattcggagtggtcgttcgggcaagttgaacgtttcttgaaaaggacataacgccaacgatgaacgatcaataaagcataaaatccgggcatctaaccgtgataaatcctcgtaaaagctgtacgattaccgtgtcgcgtcgcgcgtggaggttcccgatcctatcgagaattttcttgacgctacagagccccgtgcccctgatgatcgagctacgacttatttaatgataaattacaaatcgacggtgaaactaccaaaccacgtatctcggtttgcgacgtcgcagacttcctgtcatactttattttttaaatgaaaagctacttaacgtccagtcttgaaaatttctgtgatttttcctcttcgtgcggagaaaattccgtgaaaatttcaaggaatgatattgatttggtctacttcaaaaaaataaaatgcgagcgtagatttttaaacaccgcaaacgagatacgtggtttggtagtttcaccgtcgatatatcgttcaaaagaagaacgccgtaattccattttggatatttcccgttttactctttaattaatgcattttccaggctttaaccgactttaaaccttgacaaattttgcaaaggttttcatctatcatctcagctaaaaacgatcatgttggtgagtgacacttggattacattttgcaataaggaaccactatttctggcccattttagaaacaacatacatgtcattggtttccctatgcagatatgcgcttttatgggagagccaaagatagtggttccttatcgcaaaatgtaatccacttgttccgtccgctatattcgtcgttttccggacgaagaaacgtaactccactccaaggttgcaaaattcacttaaaaaattcaattttttaggagaatgtacctgtggattttttgtccaaaatgtttctgatctccaaatggaataacgacttaatttggggaaaggctgcaaaagggagacaaatcaaaagaaaaacccggaacgtttcgaaatggttacaattccattatcaaccggaaacaaaaattaaatgaaaatgagtcgtcgattcgccgtaatttcgataccgaaacttttttaatgaatcagagggaaaatcattgaaacagtcagttagaattgcccaagattctcctgatagaaaaataacatttatgaaaggaaattttgcaacactgaaattttagttacgtaagagagacgacgaattgacgccgacattcgtgatcttcctcttcgagtaaaaatgttccctgcttataaatcgtctaacttctataattttcccttattttcaggttgggtgcgattaaggtcttcaaacccttttgagtacccgtatattgatgcgaattactttgcgcatcctcaagacattgccacactagtggagggagtcaaaatagctttgcaggtgagtcaaatactttcgacacaagttgatgatatacgatcatgactaaggtgacgtcatgctggcgtattttatttgacaatatgaaaacaaacgaatcccacattcaagagttgcgtaccgtctggactagggtttacgtttgaaaaatgaacaggaaacacagttacttaatgcaaacgcaacccggcatacatcatagaaattcagcgtaccgccgccaaattaaaacgccttcaatgaattgaataggcacaccgtgctcctagaaggtcgaatagtggtatctcgccccacagcacgtatcatgagatattgtatcataaaccaagtagttttgggggtgattcttttggcagttacaaacttatttagctttgatgaattaattttttagttattcagatcaaattacggataaaattttccgtgaagtttacaaaaaaaaacccgttagttttttaggaaatacacgacatcttccagagaatttggaaacatgtagatgtagttctacgcacacgaagtacagataaggaatgtttttaggtcaactcaaactaaatttcctcgactcaacgatttttgcactttgaagggctatattttacggaacgaatcgtgatttggattacattttgcaataaggaactaatatctctgcttctcccataaaagcatatgtctgcaaacggaactatgtgcattatgacgtgagccatggtatgcacgtattcttatgggtctcagggcttatgtcctactgcacatagttccgtttgatagagtatttgtaagtatcaaaaagtcagttagacatttttcctccacaaggatccatgcaattcaggcactggatgcgaaaagggcacttctcggttgcagtatttcagagtttctcctaatatttcattcattgttagcagagtgaatgcatccatttcactcaaaattccactgaatattccttataattctacaattatctatggaaagaattctggaaaaatcgcccattaaagtcttctccaagggattaattagcaacagagattctgaaacaccgcaatcgagaagtgcccttttcgcaaccagaaccttcttcgcaaccagtgcctcaatttcgaaaccgcaaatgcgtatttctcatgcgccttgtcttccaagcccttcgtttaatatctttgaaagcgccttcaattgacccggccgcaattgtcgtttcaggtgaacgcggcgtcgcccctgcggcagttcaactcccggctccaccggatcccgatccctgggtgccatcgtctagccttcggctcggacgcctactgggagtgcgccatccggcacctgacgatgaccatctaccacccggtgggcacctgcaagatgggtccctcctcggacccgacggccgtcgtcgacccgcggctccgcgtctacggggtgagccacctccgcgtcatcgacgcctccatcatgcccaacatcgtctccggcaacaccaacgcgcccaccatcatgatcggcgagaagggcgccgacctcatcaaggaggactggttcagtggcgccttcgctcccactgtcttccagatggtccccgcgggttgagcttcggggcggctaccccgtcgtcacttgtcaccttcactggaaaaaaaaaacacattggatctggtgtctagactcttaaaaacattgacaagaaaaaatactcttgattcaatcggatttttgcttgaattaaaacgaaatccgcttaaattgagaggcttggttcttgatttaagcatcattctgattgaatcaaaagtgcttttttttgtcgatgtttttaagagtttgaactctagatccaatttgtttttttgttttttgtgtgtgtgtgtgtgttggctacctctccaccatttcgaggtgggaaatagacagatttagagactacgtcacggttcgatttggttcaattggaccacactgaaaaaaaaaccacattggatctagagtccagactcttgaaaacattgagaagaaaaaatactcttgattcaatcggatttttgcttgaattaaaacgaaatccgctcaaattgagaggcttggttcttgatttaagcttagatctgattgagtcaagagtactttttcttgtcgatgttttcaagagtctggactccagatccaatgggttttttcccggggttggctacctctccaccgtttcagggtgggaaatagacagatttagagactacgtcacggttcaatttggctcaatttgaccacgctatgcagaaaggaaccaagctacatcaggtattgcgaaatttaatgaagattttgcacacaaaaattttattgcttcatctgaaagtgcctaatgagttgagttcgcagtatttttcatgatttttttctgacatgggatattgggaaaaaaaaatgattttaaagagagaatatgtgccgccttacgacgtcatctggcggcgtttcccatttaaacacatgtattttagcagaatcggttattttgtcatgtctcctctagtaattgcgcaattgatgaatcaagggtatctgtgtgttcaattcactcagtggattccacttaaacacgaaattcatcaaatttcagacctttgggtcaatttctccattgggcaatttaattttttacatgcaaacggttgtgtggatacatgtgcaaattttagtgaaatttctgcatggtacaaagcaaattccctagaatcttcaagagaatctgcacaaacgttctcatgtaaaaaattaaattgcccaattaaagttggcaatagcagatgtgccttggttcctttctgctaaacgcggtccaattgtaaacaatataaccttgtctttgattcgcgtacttcgcgtcatggtggtaaaatgcgttcaagtaggtatttccttcaatcgataattctcgtattaaatgagttcttaattgatttatgacctgtcaatgactaaattgtaatgaattaacaaaactgacccattttgaatttgtacataagttatgttaggtcatattatttgttatggtttgaaccaagagttcgatattgaatcgaatgacgtagtcattatatcagtctattgaggctatctctgcattggcggaactaagagggaaggagtttgggatttcgggagcctggttctctggaagtctacttgacctatccccgataatgacaaggattttgctaccacgttcatctgtgaaattgaaagtcgaacaatttctcggtgagtgcaactcaaaattgctcatgcgagctgattacaaacattgatggacaaattaatagaccaaggagaaattgagcatttctattggttgaaacgggtggttgttatagtttaaggcgaaaaatgatgaactaattataggttccttcgtgggttggtgttcattagtctattagttgccttttttgtccactgccactacacgcttccaccaataaaatggctccaatttccttggtcttctttgtctatgaattttaattatcagtcggtttttcaacgactgcatttttcaaaatcactgttcattatcaccattcaaaacttcgactatcaagttaccagaaccaagataaaagccataattgtaagtacatgattgcaatgtttgtatgtgttaaaccgctacattgacttgatgatttttttcgaaaagtccatgaactcaggtaaacaatgtacataatttttatgtgagtacatataagtttactacttttgtatgttaccattaccttagtttattcgtttatgagtgtcgtgttcaaacgagattgtaaaagtaatataaatttcaagagtgcttgcttgtgtggctaactcatgacagtaaaacaagagacatatttttgtcggataatacaatcacattgatttttctattcttacactattaaaaagaggtaattttgactatattttgggcagcataatacactaatttatgattgatacacaccttggctacctaaaaaatgatacgaaaaaagagatttattacgattgcaattgggaaaaggtggttataaaaatagccttaaaattagtaaaatagatccaattttctaaaagatatcattaataatagagttttaaacccgtattgtttcatcagcctctgaaagggttgttcacttgtaaagtatatcaactgaactaaaaaaaacccttaattacaactttttctgttattttaataatgggcgccacgagcgaaaaaacatattatttcataaaaaagataacaaaggtaaatcaaataacaacatttgggtacggcatttaagaccgaaattattgaactttggcaaggctgtgactggactataactttaaaacagcgcagaggacttttttttggagggggggggggttgagttacatttaccaattgagtgatcagacaaaaagtcttggatcaaagtttagtctgaatgaagatacatattgttttctcgatcagaaaattacacagtcaatagctatgcaaatgctgaatagaattgaaaggatttacaagtccattttacaaatgtaaaatgtgtatacttaagacgatagattgtagctcgttattgtgtaaaaacttgtttgtatgcatgtaaataaaatttcgtgtaaattgtatacaaataaaaaacaaaactgcgaccatttgacagttttccttttttgtgatgcttagttggtagttcaaagaagaaaattgaagattcttccaataattcagaggcaaaaatttctatagaatatggagcctgcatttctgactatttcatttcattagcttaggtttaggttgctttggagtcaaaaggtaagagttggactcttcagacaatgtatcactcattatcactgttaaaacttgaggaacttttctgcccgtgctgagtgcatcttgatcaagttacatgaataacagaataatttttggtgaatgtttggaaatctcaaaatctcagacaacggttatagaaaccatgtttagtaaatgcgcgttactatatcagaaagaatctgtctaaaaagaaaatttataagaataaacaagtgactgcaaacgtattctattgtacctactgcactgacaatgagcttttgctgttcatagattcgtttagtttgataacggctggttaaagtaagtcattagacagacgatacaatcaaatgtttcgagagacatacaggagcttgtcataaaaaatttccttttatgcattaaaatgaaagcatgttttacagagcatggaaattttcttctaggattatgttttaaactagcgttctttgtcttgggagaaaaaaagattataaattaatagtgatggtgaatttaactatttatatcacacaatcaccacgattcattcaaatttatttttactttcttgattgtaccaccaaggacgagagaaaaaaactgagcagtgggcccatgtgcggatctttgcacactcttgaacttgttccccaattcaaaaactcacgctgagtaattgggaaaaccctcgaaagtgtgctgatccaataatgctggataaattagctttcagtacgtaactcgaccagttgaaatcaacacttaacactttaaatttctccacttcctccgaactttattcgctgacaagcacattcagaaaaggaatgagtgtacgtgagtttcgatggttacgaaacagctcttgccattcgtttcagatcaaagtcaaagtagtcataagagtcaagtttaagcactctgaaaatctgttcatgacgttccgaacagccagtgggagatgtagccacagctcggtcaaacgaatttcacaatttaaaaaattgaaaaatcaatggcaacgaacgtacgggcagaatgactacgaatacaatcattaatgcaatgactcctttcactggagtaaccgagattaggatggaaaagtgagaaacaattcttcgatggactttctcgtaagttggaatttgaaagtaaaattccaacttacaaaaagatcgaacaatatttgagtcagtgagagcggaaacacaccaactcggtaactagaaaatgctcaattttcattgaagacagtcagtttcataaagttcatagaagttaacgcatctttcccaacctggacccttaaagtgtccttaagtacttgtctttaagcaccaaaattgtttttcttagaacttctttaccttctgttcagttttttgtgtgtcttgattattttcattttttcgagttggtgcgttttcgttctcactgattcatttggtacaaaagattgaaaatttgatagacggattagtattttacgaataaaactttcttaaaagaagcaaaatgttctgttgggtaataaaaattcgaattaataattcttagacaataattctcgtagaatccttgtttcaaacagtacgtctatcatttcaaagagacgccttgaaaatctctgaaaaagaaacttcgaagatcgatccgaaaactataacatccctccctgtatacagaaaggggcgttgtaggtaagtcagaaatgtcactttcttctcaagcggtgcaagttcaaagagactctggatgcaactattaatcctcactggagaaccgtgttgtatgaggaaaaattgaaggcgctttaagtttccttgcgcttacttacaacacaacaattatgctttaacagttcctatttaggaagggttctgccatctaaatcctccaactacagaaaaagtgagttgctctgtgattggtcggcgagctttaggatttcatggtagcccgtacgctactaattgttcttaacaatggcgaggtgtgattggtcgactatcgacaatggagatgttgcatgtgtgaggaatttgcgatttgactattgattctcaaataaaagttcgcgagaaacacgatggtgccactggttttctctgaaatcaactcccaagctcaaaaaaagctctcaagttgaggccaaaatggaggggatatcccaccctaccctgagagtccacctctacatcaagacaaactctccatgcaaagatagggagcaaatacattagcagtgatgccgtgttttcagttttagagttcccaaatgaagtggcagccctgtcaatgaatttgttccctatctttgcatggagagtttgttttgatgtagaggtggcctctcagggtagggtgggatatcccctccattttggcctcaacttgagagctttttttttgagcttgggagttgatttcagagaaaaccagtggcaccatcgtgtttctcgcgaacttttacataagaatcaacagtcaaatcgcaaattcctcacacatgcaacatctccattcctcagttgaatctatgataaagaatcgattattcgggtgttcgttgcgaacaccctattcgtcgatccatttccataggcttaaaaggcagatcattcgatatatcgcaaagcacgcgacaccactgttagacaccgcttccggcgagaaaatctcggcgggttcctacccgagttttgaattcacaaatctcgttcggggggtatcggacgagggaattaattcgtattgattggacctgttcgcgttggacgccgggcacacgctgcttgtggtgttatccttggtggactgtcatcgacaactttttcctgatcgaccccgacaagtcagtgccgtcggattcgtcattcccaggtcccagatcccagcttccgctagtattcgtttgataagaaaatagacgtacatcttctaaacgaaactagagtccctttaggccttgtctccacggtacgttttcatgggatttgtcccaagttcgaatcgcaggaatgaaacttctgggatttttccgaattaccgtctccacgggacgaggctcatccggtcctgcgactagtttccgcgggaagataacttagttaaagtcgagaatttaacagggattaaaataataattgcattctaatgacaattagacacattattttaactaaacaaacatgaacaatggagtattcaacaaaatatcgcacaattcgtttacacttcttcttcctctctcagtgggtcctaggggtaaagggccatacttgatactgggaaaaatattgagctaatcaatatatttccgtattatttttcccttcgtaagtgggatttttccctgggataaatctcgtgaaacggcccgtggagacaaggctttatagagagagctgagacaacgcgacttatggatgtcacaaacggaaataaagattacacaaatcggacgttttttgtaatctttgatcaacccactcccgaattcctgcctccgttccctctctcattccatttgttccttgtcgtacccccgattccccggtccactccagtttataatctttgcaattggtgaatgtgtaatctttactgccctgtcagcactactggcaaaagttcacggaactcggcgcgaaagttaagttccgtaaacctatctctgtgtggacaaggccttccatttatgtgaaatgattgaaaaaattatgaaagaacaaacataaatgtgtttaataagtttaacttccgccgcgacaccgccgcgccgcgcttaccgcactgagtttgacgcaatgcgtgaagtattcatgtagtcttgtaggcactgtgcgtttcatgcatcacgccgcgccgaccgctgttgaccgtactgtgtttgacgcgatgcgtgaagtattcatgcagtctcgtaggcgctaatatgtgttacatgccgaccgccgcgccgcgccgagggtttctccttttcatctcaagttctcgtcatcattgctctctgcgccgcgccgttccaggccaaattccgtgtttggtttctttcttggtcttaattcgactaattaaaggtgctgtctattgtatcatagagagatgacaaaattagcgatatactctcggaaaatgagagattttgtcatcttttctcgtttgaacttttttttcagaaaccgatttttctttatagctacgtttaaaaaaattgcaaaatttgccgctcccgaaatttgccgccatgggccgcggcccatgtcgccaccacctaaatctagccctgaaaaatacaaaagaaagtctcttgcggtttcttgcgggttccgggccaaattccgtgtttggtttctttcttggtcttaattcgactaattaaaggtgctgtctattgtatcatagagggatgacaaaattagagatatactctcggaaaatgagagattttgtcatcttttctcgtttgaatttttttttcagaaaccgatttttctttatagctacatttaaaaaaattgcaaaatttgccgctcccgaaatttgccgtcatgggccgcggcccatgtcgccaccccctaaatctagccctgaaaaatacaaaagaaagtctcttgcgggttctgtaaattttaaggtgggtgcgcaagatcgcttgaatgcgaatttataaaatgtattaaactttcgatcaaatttgacttattagaagtcttcttagagcatattttagtacaatttttgagtcaacttttcagttcatgatcgctttcaacccagccagcctgcttccttttaaatttgaaggttggcgaggactctgtttcggatagttcttttggaaatgttgacagccctattggatcctaaagaatccatgaaacgatttgttcataccctcccaatgtaggaactcgaagagtttcaacgcaataaatgattttaactcacattactcatttccacattcgactgacgacaatacaatgtttctaagttgtaccgatgtagtttggaacattattgcgtgaagaattatagatgcaaaagtatgcgtcgaaaaaagttacgcagctgactagacggttctgaccggttccaggagggagtttttttacacagctcttcttgatacagaagagaagaaaaaactgaccagattcaactcactgtgctattcaagtaatgaaattctttggataaaaacgagatgcttgaaatgagaattcgtcttaaaaacacttgctcgtttagaaaagaaatgagaccgagtaaaatttgcccgtttttcacacacatcaattttttttcaaaaaaggaataagaaaaaaagtatagacatataataacttatttattcaaaacaaatatgaaaaagaatggtttacatacgcataacgccgaagttaccgcataatgaataacattcttttctttctgtgggatgaaacatcaagcaagagttaaatcaaaatctaaaatggtatcgttaaaaaaaatggattcaattatcagttgtgtttttacaactgaagcagaggagaatagacggaacattttttcttaattctgtaaatatatttcttaaatattccaatgtttttggagaatatcggatcttcttcattttcgtatgcaaaatgttatgaacacactcccttcatgaaaattcaaagattgtgataaaatgaggtagaagttactctcagaggtttatttaatcttatttttattcgtaaatgcaggtctcttttctcatggaccgtcgcaattgttgactgaactttccagaatgtcccgttgccacgaactccctcatttcgactctcctgtaatgtgattcttaaacaataagcacctttcctggagctacgggctgattaccgaaattgatggacaaagctatagacaaagaagacaaagagaaaatttagcgattctattggtaaaagcgggtggttgcaatggaagtaagtgtaaaagtagtagtagacgaactaacggcaatccacaggtgatctcatatagttagtaatttctcccttggtttataacaaccaccccgtttcggccaatagtatcgttctattttccccttcgtctccttcgtccatcgatttgtctatcccattcgattatcagcctgctgggcgcattattcacacagccaccgtatgatacacagcctaaacaattttgatggagtatatgactgcgaatatcgactgtattttcagttttaagctcgattttaagcatctcaactaccaatcatggattgattgaggctgtgaaactctttgctccgggcattaacagtcattgcactacttaaatttgatgaacgagacgttatgatagacattaacgtgtgcttaaaagagtgacttcgccacgcggacgccaataactatctcgctaaattttacgagggtagtccgaaagatacgctggtggattttatatgcggtcctgttcgcgccaaaggaaaatcagatagttacgtggcgacacatggcgtgctttgcgatttatcgattgatctgccatttaaactgatggaaaaggatcgatagacagtgagtttgatatatcgataatcgatcattcacgcttcgcccccgaatcagcactagcgttacaggcgttacaccttgctcacttcgttaaatcacttcctaaaacttttccctcaaaaaattacattctaataataaatggcacaaactgtgtgtgatcatttctcaggtgaaaaattgctgcggaaattactattttcgtttgaattttcatttttcggtttccctttttcaaatgcaaaatgagctgatgaatgaacctgatggatgttgatgcttaaggtgttcttcgaggcacctaacaagcgcaacccttatatgccgaaatacttattccttgctgcggcctagttgttgaaattgatagacaaaaaaggaaacggagagatcctattggtcagagcgagtggctgcagagggcgaagtaagtaagtgataggctaactggattgcgttacgctggaaaaaaagtaaaacatggacaagaaaaaatactctctgtttaatcggactttttgcttgaatcaaaagagtatccgcctgattcaagaggctcggctcttcgattcaaggaaaaatcagattcagaaatcagatcttgtcaatttttttaaaagtctggactctagatccaagcgactttattcccagtgttagcagaaaagaaccaaaccacatcagatactgctaaatttaactgagcaatttaattttttacaagaggacgtttgtgcggattccttaacaattgtaaggaatttgcttcgggctgtgcagaaaattcactgaaatttgaacaaaaatccgcacaaccgttttcatgtaaaaattaaattaccctatttaatttggcaatagctgatgtggtgtggttcctttgtgcttcacgcggtcaaactgacagttacccacgagagatcctctagcttgtccatcatttttccctctagactaaaacaactatacctatttcaaccaataggatagctcagattccctttaatctcatatgtctattgcattgtctatcaatttcaataatcagccctcagtcaaactctacccacatgcggagtagatttagcgacatgtccaaaagtgtgagccactgccaggcgcaccctatccttttcttgcgcacacctatttattcatcaaacagattgctcaagacgttacgtgccagtcatcaggaggtaaatactcgtagtgttgccggaaagtaacttttacaggaagaaggagatgctttatctccgaatggagctaactgtgaacgaaagaggtcaaaactcattcacgcgatgtagccgaatgtcgaattttattccgatttgaagaagacggtgaggttagatgacttctgcagagatgaccggcagctgttgttttcgacgtgacccgcagatttgacttacacaaagattttggggtatcaaaatacgcggtagattagaaagccgatcatgtaggcgcctggggagtcttctcaaacattgaaagaaagcccgacaaacatgcggtcgggtcaaattgataatgactgaaagagagccgcgagtccattgggaaagtggtcaccgcacagataatcgccaaaatgagtcacggggtggcgcttacagtcttcaccacgagaaagacgcgaacttcgcaataatggaccaatatcgcgcagctcctgttggtgaatttcaatgttacttttgtggtaacaaatgttttagtaccaattaacgacactgcattgttattttcatcgaaaagattgttatcaccgacgtaacattgtgtgagttaccgtcttgagtaaaaaaacagtcaaatctcattcaaaaccgattagtacggtcactagtacgacgttaaacctagtggtttggtttgtccctttgagttgattagtcaaatcgttagctgcgattagtcaaaccgcgagctgactcgtcaaaccgcgagctgattagtcaaatcgcgagttgactagtcaaatcgcgagctgaaacatcgaattttcttgtaaattcagatttcaagcggcttcagtcaaacctcaacttaacttgtcatttgacaatactattaataaaatcacgatttgactgaatgtcagctttcgatggtaacatgtatcactccaattagaaaagttgataggacctgaaatccactatgagcagtgtacaaaacaacgatcattttttctccgtttgatagttttacttatatcactaacaaatgaacttcaggaggatcatgtgtcaagcttactgccttcaccatttaaatactgaacatcccacccccaacgctgtcactataattcgcatactcaaattgttaaaaccattctcagttgaatattcaatgagaacgaaaaaatatttcttcaaacatcggaaaaattgattaacaaagcgaggtttgattagactctaaaattaatcttcagtaacttcacttcgttagactcgcttcaatttcattaaaagaaagtaagcgtgcataattacatttgtgcataattcatttcatattacatggaatgatcttcattacactcgatctcgattgaaaaaattgaatgtaaataaaaatgcaaagcaacaaatgacgcctcagtttcaaaaggcgggcctttctggaaacttttctcaatttccccgcggttatgcaacaacatcacatgctacaccggttccggtcactgcgacgacaaaagggcgtaactcttttttgacatgagccgtgcgaagcacggttttatagggataccaagggtcatgttagaacggagttacgccctttttcgggagttttttcgcgcgtcgtcttggggcgggggagaaaaaagcctcgcggcgagtggcgagtggttcgcgcgagtcggtgaaatagggcagacgaaaatcggcgagcgcttgtttcggattggtcgcggcggcatcaaggtctgcctggcgaactagacccagttccacgctcgacgagtagtgacaacccctccctcccccgggaaaggaaaaccctgacactgaccagtgaccgccgagccgttttccgcgccgcgtagtgtcgcgttcccgcgagttgcgagtgcgcccgccgaaaaagtcgaaaaagatttcgaaaagatttcgaagtcgaaaagttcgaaaaaattttcgaaaaagtcgtcggggtttcgatccggagtgtggtgccgttgtgatttcggtggcgagcgatgattcatggatttatgtctcccagtaagttcattcattttgaaaacttttcttactacattaaaaaaaataaacgccgtttaccagggtgtgtgtaccagggtggcatttcatgaaaaataaaattttgtaatttcacgtgaaatatttcacgaaatttcggaagtgtacgaacggtattgaaaaataccggttccttctcatgttttgcaaaatgtaaaaattgtgactttcttctatttttgtgtgattgtgtgcgggttgcatactctagcccctgaaaaatgtgaaatatttcacagccgaaaaaatataagccgttttttgcgtgtaccagagtggcaaaatttcatgaaaaataaaattttgtaatttcacgtgaaatatttcatgaaatttcagaagcgtatgaaagatattgaaaaataccggttccttctcatgttttgcgaaatttaaaaattgtgactttcttctatttttgtgtgtttgtgtgcgggttgcatactctagcccccgaaaaatgtgaaatatttcacagcctcgtgaaaaatcatgaaatatttcgctgaaatttccaatctttcatttctttcttacgtttcatgccaccctaatgtgtacgtctgtatcgatttgctttctcatgggttaaacttttttaagcagcagctcgtgacaatggtgatgtcaaaaatataaaagaaaaaacgcactaaagctggtccatgtaacttcagttttgggagtaaacacatattggattgggtcgcgattctccaaaaaaactatacaagcaaacgcatttttttggtccatacgactgccattttgcgagtgaacaattgaacatagctctgcttgtccctgttgctccaatttttcgcacttgagatgatccaagtcacttcaatttggcgagtaaacgcaccacctacgccggtctatatttctccaatcatgccggtaaatgctcttgtaatgattggtagaactctgtttctgtacgttgacgcagcttttcgacagctttgttgaaatcgacagttgtcatcgtaaacaaaaacgtcgcaggagattctagttgtaccgcgagcctacacgaagaggcgcttcgtgccttgagaggttgggcttctcagagggcagagggtccatctccagtttcataaatgcgcatgatggtcagcaaattctgagagtctatggatggaatagttggaagtgacattcaatgagtcaagtataatatggtcatcatgttaaagtctacggtggagaggttcttaaaggcgaaaacttcgcgaaattggaataacttttgcgactttggggtaacttttgcgtaactttcttgtaaatgatcctgaatttgagactaagcacatgttttcttaataatttaatttggatttttatgtcatgaaagaggatacttcttttctttaaatcattcttcaattcttataaaatagtcaatagttttaggaagactggagaatctactgaggtcatattttgttggacgcagataagttgtaggggctttcatttccttctttatttctcaaacatggtaacagaggtagcaaataatcatcagtttagctggttccattactttaaaataaatttaaatgcgtttaaaaaagtaaactttgtcgaaagttcagagcaactgttaatggaatcactttttgacgtaataatttatgtcaaatgcccataaacgctgaatgcagcgcttccattttttgcaattcaaaacttaacagaaggggacgccctgtaaagggatggcgccaggatgataaagaaatgatgcgatgtcagttgcccgataacctctgagaagatgaacctctgacgtgtggcgtttgggtgtcgcagaacctccagagtacgttaaaggagcgacttttatgtatgtaagactttaaaaaatggatttagaagatactaattgctagtttataacagtgctcagcgcgtattgacacagcgatcaagcacgtcattaaaaacgaaaaaaatcaataaaaaacatttttttcttcttctttttttcaaatgcgttttttgtgaccagaaggaattttccctgcgtaaatactaagatcttggatatgattagcatcaacaaataatgatgcgatctcaataatgggtcctccttcatggaatcactgaaattacagtaatgaattttaggcaggtgattatatcaacttttatgttgatctattaataatacattttaaaagaatctaaaaacctcccagctaagaacatcggcttaaattaagttcacgcaacgaattacaaatgagagcttggaaccattaagttaaaataaaaagaaataaaccaagcgcaataagttttttccaacattagtaaaaaaaaaattcagcatgaaaaagagtataagacttaaaagtattttgaagagacgttaatattccgattatcattgttttttcaaaaatacacaaacgacacttctatactgttcatattagttaacaattgttgggaaaaagagacagtcagtgtcgcagattccagtgtccaaggtcagaaaggagctgctgtaagttttttgatcaaaggatgcagattttaaattacctacattttaatttaaataggtggagcgattcgtgtggcatgctgttcttaaaaaataaatgaaaaaaataagggtaaaaaaggcaactgtgtgacgcgatgaatgaattcttcgatccttgtgatatttaaaataatctcaagttaagcagatatgaaccaagtcacaatatgtaggaacggaaaacagagatttgagactatatatctatacataagactctatggtgaagatgaagtttaacgtatttttcagattaatttttttttctttattcgtcattggatttgtgaagaaggaaaaatgtacaaaaagttgactttggaactattacccactcgtcttttgccaaaatttagcttgattactttctgtttattcagtccactaaagggtccaacatcaagagtgctcttttcaatgcattgttctgaaccgatactgctttgaaataaactacacagttttgaaactgtgacgcacctataatgtagaatagtcggactaacgcacattattcacaattagtggcatgacctgaactttttcgtgtaaacttgtccatggttaaaaacttttcaaaaagagagacaacctttcaagtgggtctggattgaagcaaagttgttagttcaaaatttatggaatagttccttcgaatacaacttttgatgttccttcagtctcacggtgctatctttccagacgtgtttccatagtcaaagccaatacttcaaaacttcaacaacttcaacactgagtttcaaaattaagtgcttcgacattcatttgtttgtgaagcaaattcaaggatcaattttgataaaaacttttagaaatcggtacttctaaaaatttcgataggtcgagcatagagtcgtttaaacagaaaaaatctagtcagaaaaaattgtctagcgacatcaacaagaataattaaggtcgaaagccaagcgggaaggggaagtgcatacgtatgagttgctgattatgatatttttttcgttttgttgtttggttccagcaattgaaaacttctttttttaaagcattctaggtgattcttatctgaacatgtccctcgtccatctcaccctgctttttagagtttgatggaacattaggtctgtcgtgctaaggaaaaacgccgtgtgagcctccagatgttgccgaatttcctccaatgaataaaatattgattgcctgggaaatttgtgaatattttccttcgagttttttgggaaattttaattgtaatcggatctaaattacctaaaaatttcaagaaaaaatattcacaacactccttacaactaagaattttagtggaagaattttggcaactctcgaatgttcatacggcgttcgcgttcctccttacactgaaaaaaaattctcggcgtttttaccaaggtccgttggtacctttaccatctcactttttttaccaattattggtaatttgaccaagactgactagtaagcttacctaaaaaccggtattcttactgttttttttttcaggtaagaataccacttttattggtaatcaatccccggtaactttgccattttatctcggtgattctaccacagtcgataaaaaatattggcgtttacaccaaggtccagtaaaattaccgagaaagttcaataattttaccgagatttctcggtaaaattaccaattccatgaatggtaaatttaccaagaaaaaactgggatcaaatagaaccctgaattcttggtaatttcacccttttctcagtaaatacaccgagatttttttttccagtgtagcacggcagaattatgccgatcaatttcaaactttgtatttcctgaaaatttccatttccggttgcggtctttcattaacacccaaatactatacaaagtttttttctttgagagcgacttaatcttagatttggttgaggtaaaaacactcatagctggattggcgatgatgtagatttcttgtaatttttttttttttttttttttttttccaataaagaaaactagtgattattatatctcgtgactctttcacagatttttctgcaacatcgacaggatattctgtaaaaattggaaaagataacagttcttggctccataaaaacaaagcgaaacaaaaactttgaaaagtgcaatcgcggcgcatgttattcaactctaaacattctcattttattttaagctgccttaacgtgaaccataccttccgcctccattgtttccattctaacatttgaatattgccccatgcaaagcatattcgagcgacagggtaatttcaaatcgatgatatagttttactttcggaaattcccacctttgaaatcatcgcaatccaagaatattgtcatgacttaatatatttacttggaccactgctcaattttttttctgtcatttttttgtcaacctacagaatgatgcatctggaatttacgtactggaatgagacagtccacgagttttttactttgcgccatcgaacgtctactttgatagaaaaagataagcaaacgtattgggcgagcactaaaaattgaagaagttgacaaaaatgttggcatttttgaggtttggggttgtgatagtgttcgatctttacatttttatgatgatctgaacgctttattctataacacgaggagtgataaaacggagacttatttttacagaatttcggttttagatctgaaaacttgttatcacccccatcaaaggtcactctatggttcaaactagtgatattgacttgactaatttgaggtagattggttcgatgtgtgggccggctcatttctttggttcagtttttcctgttcggacatcctgcagcgagaaactcgttatgcaagagggagaatttttccttaaaaatgtgtaaagaattcaagtaaagtggcatctgtataaagtgattgaaaccatctcgtctcacgggatattgatgatgggttggatgataaaagaaaaaaaaaaagttaaggagacacccttctttttgaaggaaaaaagttttgggggcccaaaaatagaaaggaatgaaacaatgaaatattctcaaagagtagtgttgccgcgctaaggaagaacgctgtataagccttcggaaattgccgaatttcctatgataagtcacagaatttctaagaaacttataaatatttgcctttaaattttttaaggacttttagtcgcagttcgatctcaaatatttgaaaactcaaaaaaaaaatgtccaaaaatcttctcaatagtagctatcggacttgtaatagttacgttatattaaaataaaattccttaaaaaaaaaagtaactattgcatcggcagagatctggcaccatttaaacgttcatacgacgtttctccttgctgtggcaaagcttctacatattttgagaaatataaatcaaaacaggatttaaaaaatcattttcatattgatttttaacccaacctaccgttgtttcgaacgtcagaaagttaaagttttggaaagtttttaaaaagggatcaaaattctgcattggtcatacataggaactttaattttattgtgaaaagtttcttttgtagatgtcttcctacaaattaagaaatcgatgagatcttccaaataaccaccacctcattaatcaaacaaaaaattgccccattcgaataaatttgtagcccttatggagagatatcaaattttcaacgcttgaggggtagttcgatgaagtaccctaatcaagcctagcaggatgcctgttaagagaatgacattattttttttttagtaccctttttacaatcattattcctgcttttgcagatatattctcaccaatatttgtgccaaaaatatgttcattttcgcggggtaattcaaataatttgttcgcgttcgcaagcatggcaacacggtaccaaattcacattgcttggacgagattttgcggcacgcgtgcttcctgagcaacacaaaaaattctctgtaattggtagcgggtccaacaattattcaccatatcctgaggaaatgcgcgaactggtttttgttcacaatcgcaccctcatttctcgctgggtgggatccgcggaatcacattgaaaggggtaaaagcgatgacctcttggagacgcttttctgcgagaaaatgagttactaaaataggtcctattgacgaccctcataccgcctgaagcaagagcaatgtgactaacctctgaaatttaagacacaagacgtcttaaaacaacaaaaaaacggcatatgtgtatactccagaatttcctattatctgcgcctaaccatcggaaacttaaacatttttaaacaaataaatcaaaaactacgtgatcaagcattctaacactggaaaaaaacacattggatctggagtccagactcttaaaacatcgacaagaaaaagtactcttgattcaattagaatctagcttaaatcaagaaacaagcctcttaatttaagcggatttcgttttgattcaagcagaaatccgattgaatcaagagtattttttcttgtcaatgttttcaagagtctagactctagatccaatgtgtttcatttccagtgaaccctggatcattttgatacagagaaaagattaagaaaatcattttcgggactcttttttaaacttaggtcagagattcctcttgaaaatatgtcaaaaaactaaattttccagattttgtcatgaggtctctttacgcatacagcgcaacacaaaaaaaattatatagctacagaagatgcatggtttcataaaatttcctttgaaaatagatccctctcagacttttcaaaaactttgtggggctcatggtaattctagaaaatacgagtattttcggaaaattgaattttagaaaaacctttttcccaccgtaagaaacgcatatttttttcaaatattctcgagtacatagatcacttttttaaacgacgtccaattgacactcgtcaaggtctcggaactttggccgtctgtaatacagatctttaggagaggtgttgccagtctgcggaagatcaccctggatttccgctccgaaaggacaagaaaactgtaattagtaggacattcggcaaccggggaaagattaaagcttttatttctcaattaattgcaggctcggatttaaagcgaagtcgcatgctctgtttctgacgtcattagactgcgccaagaacgatttccgcgccacctcacgataataattgttacagttacggctgatcagacgctaatatgggatgagctgattctaaaaggatgcgcatttcaactagtactattgatttgagataaatatacttgtttatgaatatccttgacaagttgaaagctttttcgcataccaactccttcaccttcacgtgtgtctcctgaaaattttcatttttccgagttgccgagttttccatgggcctattgcaaacttcagcaagagcaaaaagaaaagttatttttatactaaatggctcaaaaattacgaaagtctagaatacacctcactttacaatttgcgtaaggaatatgcgttatcttaaacttgacataatttcctctaatggagaatttgcacgcaatttttctattgcttcatctgagagtgtttaaagagctgatttcacagcatttttcataatttatttcgaaaatgggaaaaagtataaatatagatttatacagtgagaaaatgtaccacataatatatagcgacgtcatctgacggcattccccatttaaacaccaaatgtaatgtaacgtaatgtgcgtatgcatcgtatatgtatgtgtaatgtttatgtattctagcaaattctatcatttcgttatatctcctcaaataattgttcaatttctgacccaaggtatctccgcgttcagttctctcagtagctcctcttaaacacgaatctcatcaaagctcagactcctgcaaattctccattgctggacatcgacggatccacaaactggcaacatagttttcctccctttaaacctatggaaatgtatcgattctcggaggggccaggtgttccgacgagaatcgattatttatcgtaggatttgatggaaggaatccgtcattgccaatggagatgttgcatgtgtgagtaatttttgatttgactattgattcttaagtaaaagttcacgagaaatacgatggtgccattggttttctctgaaatcaattcccaagctcaaaataagctctcaacttgaagccaaaatggaggggatattccacgctatcctgagagtccacctcaacatcaagacaaactctccatgcaaagatagggagcaaatacattgacagggctgccactttattttgggactctaaaattgaaaacacggcagccctgtcaatgtatttgctccctatctttgcatggagagtttgtcttgatgtagaggtggactctcaggatagcgtgggatatcccctccattttggcctcaacttgagagctttttttgagcttcggagttgattccagagaaaacaagaggcaccatcgtgtttctcgcgaactttaacataagaatcaatatagtcaaatcgcaaatccctcacacttgcaacatctccatttctggatccgccatatttgctggataccctactttgaatgaataataataataatggttccgttcatccacaggcaaactgtttctggaggtggccttcgggatcctgacactatgctccttcgagaacgggttctcgatgggccagtacgggccgaacgagtcgcaagaacagctgcggctgttcgagggtctcggggccgtgtttttggacggcgagaggttctaccgctccgagcccccagagacgaggaggattttatccgcctacgatttcatcatcatcggggctggatccgcaggttgcgtcatggctagccgactttccgagatacccgattggaaggtgcgtacaatttcatagtcaacatttttttaaatataaagttatcgtacaaatatgcactggaaaaaacacattggatctagagtccagactcttgaaaacattgacaagaaaaaatactcttgatttaatcaaaatctagtttaaatcaagaaccaagcctcttaatttaagcggatttcgttttaattccatcaaaaatccgattgaatcaagagtatttttcttgtcaatgttttcaagagtctggactctagatccaatgtggtttttttttttttcagtgaaaactatcgtacaaatatgtagcagccagtgttcgaaactcacaggcgccaccgcaccaaatgcgcctaaaaaattggccatatggcgcctgaaaaatgaaggctctgcgccaacgtggcccctaaaaattgccccctgaaaatacggattttcatagggagtctcacaaagaaagaaaaacaaatctatttgcattaaaaaaaaaaactcagaattttcagcactacaatttagtgaaagctttttctattcttcacgatttcattcttagtgcttttgtcttccccaagttaccgctacttactagttctgtttcgaaaacatcttgcgtctaacttatcactaaatgcgccgtaacaatataggcaaaaagtcaatttggaccctaaaaaatcttcaatggcacctaaaaatcgggcttgatgcgccacatggctcctaaaactcaaaggtgagtttcgaacactggtagcagccaattatttacattaagcaattaattacatgtctcagcagataataaaactttgaaacaagggcagttagtcaaacttcgaaacgagggcagatagttaaactttgaaaccgaaacagatggtcaagttttgaaaactacagcattcatccgaagttctcttaattccgttgcatgtgcaatttgatctccgggagttgaaatagttgcagaaagtagacatttttgagagaaaaaaaaaaattatcatacaaattcatagcagccaattacttaaattaatcatttaatcacatgcctcagcagatagttaaactttgaaacaaaggcagatggtcaaaatttgaaaccgaaacggataatcaaattttgaaaattataggattcttccgaagttccttcaattccttgcatatgtaatttgatctccagggagttaaaatagttgctcgaagtcgaaacgaatggcgatcaacgaaaatcggcgcgcctgagtagactactgggtcatgaagttgcgcgttagtcatatttccttcgcttcggtgggtatgcaatttgatttccggggagttaaaatagttgcttgcagttgaaacgaacggcgatcaaagaaaaccagcgagatcaagtagactggcagctaagctatgaattggtgtaatttgtctgagttccttcgcttcggtgggtatgcaatttgatctccggggagttaaaatagttgcttgcagtcgaaacgaacggggatcaaagaaaatcggcgagatcaagtagactgccagataggccatgaatgagtgcaattagttggagttcttttgctttggtggaaatgaaatttgaactcctgagagctaaaatagttgctctatgttgaaaggaactgcgaattaaagtgcgttgtcctcacttaaaaatacgcggatgtatttagaattcgctaaacagcatcagatgttacctaatttcccccaatttttcatccttcgatacattttttccgctttaagataccaacacgtacgcgtgaaagattagtctaaaattttctcgatgtcagccacgttaccaagagaaagagttcaagcgctcagcttattaattattattgaaatattatgatcaccttgttacctttggttcccctttaatgaagtagatggtctattgttcaacccttccttgtttataatcttaagatcgtttaatttttcacgagaacttttgggaaagtagaggaatattgccagggattaaaaaaataaaaataaaataaaaaaaaaaaataaaaatagggtaccaataacagaacagatccacaaataatctctcaatttacaagggaaacggatagagaaagaatggaaatgttaggtaggtcaaaaagagataattatgtgatataaaaaaataatacattaaaaaaaaaaaaaagtataatagaatttttaatataattaacttcacggaagaaagatgcgacaaggtgaaaaacgaattattaacaaaataaaatgtgtatcatacatttaaaaataagtaacttaaattataaaatagagaaaaacaagcaatggtatcgccagtacttggaccgaaatactcatttgtgcactagataaaaccctacattttttaataatttcataaataatcaccaaacaaagcaaaagataaaaaataaggaaaaatgaaaatatactaaaaggaaacagcataaatttaaaaataaaataactttcatagtaattaacttaattatcttaattcatagtaattagtaattcatagattgcaatagtttcatcctaaagtgggtctattgatgagaggaacagaaatttcaataaaattttcgaaaaatcggagtaaaaagtaagtggaggcgccgggtatcgatcccggtacctctcgcatgctaagcgagcgctctaccatttgagctacgcccccggatggatgtaggggccgaaatacgcgatgctagcgccgccgctgtatacgagagcaagtaacactagctacgaaggcatggatggcatgtaaacattgacacgtgcgaagcacgtgcggatttcccttcttcaaattctcctttttcgttgtttcgtcaatcggctaaacgaactatattttggaacacggaactttgtatagtatcgtaagttacaccgaaaagagtgaggttaatttaacatatttggtataaaaaaagagggcgagaacttataacataccgaattacccgccacagtagttagttttacatcttggcattgctgaggtaactgctgtagtgggtaattcagtattttataagttctctcacactgtttttacatccagaatgttaaatcaacttcccttttttttcggtgtttcccttctttaaattctcctttttcgttgtttcgtcaatcggctaaacgaactatgttttggaatacggaactttgtagtatcgtaagttacaccgcaaaaaattgaggttaatttaacatttttggtgtaaaaaaagtgtgcgagaacttataacataccgaattacccgccacagtagttagttttacatcttggcattgctgaggtaactgctgtagcgggtaattcagcattttataagttctctcacactgtttttacatccagaatgttaaatcaacttcccttttttttcggtgtttcccttctttgaattctcctttttcgttgtttcgtcaatcggctaaacgaactatattttggaatacggaactatgtagtatcgtaagttacaccgcaaaaaagtgaggttaatttaacattttcggtgtaataagagtttgcgaggacttataaaatgctgaattacccgccacagtagttagttttacatcttggcattgctgaggtaactgctgtagcgggtaattcagcattctataagttctctcacactgtttttacatccagaacgttaaatcaacttccctttttttttcggtgtttcccttctttaaattctcctttttcgttgtttcgtcaatcggctaaacgaactatattttggaatacggaactatgtagtatcgtaagttacaccgcaaaaaagtgaggttaatttaacattttcggtgtaataaaagtttgcgaggacttataaaatgctgaattagccgccacagtagttggttttacatcttggcattgctgaggtaactgttgtagcgggtaattcagcattttataagttctctcatactgtttttacaaccagaacgttaaatcaacttcccttttttctcggtgtactcaataaaagctcctatctgggtgaggaaagtaatggcacgaacgttgtttctaaaatgagccagaaatattcatacccaatcgtgcagagtgtagcctcaatcgacgtaatttcatttcagaagaaggacccatttctccatcacaacacctatctgcataggaaaacgaaaggcgtgtatgttttttcccgctaaaatatgccagagagaatggtccctcgtgctggatgtagctcatttttatgtttaacttgagccgaggaaagcatagagttggaaggacgacaaggctcagccttaaatcaaatcgtatcgtgagaaaacgtataatgcatagaataataaagtgcaaagtaggatttttttgacaccctccgcgtcaaggcacctgtaaaaatcgttcaagttgccgaattctacgagttcgttttttctacgaaaaaagccagagatcacggttgtgccggttttccgcttaactgagtgtctacctaacaccaaaaagtttaaaaataagaatacactggataattagtaatttggtggcacttcactgacttaaaatgtccattttcttgaaaatgtatattggattacattttgcaataaggaaccactatctctggctctcccacaaaagcacatatttgcatagtgaaaccaatggcatgcacgttgtttctaaaattggccagaaatagtggttccttatattgcaaaatgcaatcctattgatgcacatcattcgatacaaaaaatgtagaacctggctctattgatctgagaatatttcattcccgaacgttccatccagttaatagtcgaagttcttattgctatactgccgtgctacggaaaaacgcagtatgaacctccggacgtttgccatatttcctaaaataaaaactgaagtactggggagattgcgaatattttcctgctttttctaacaattttgttcgcgatttagactgcattttgcaatttggacctatatggattccggctcggtttaaaaacaacgtatgtgccattagtttccctatgcacataagtgttttttcagatgagccagaatttatagatccaaattgcaaaatgcagtccatttaatctaacacgtcggtacatctcgaggaaaaaattcacgactttccttaaaaatacaggctttatccagggaaatttggctactctcgaatgttcatacggcgttctgtctcagcaaggttgtatagataggaatttgcggtcgattggactaaattttgctaaacgaaactaatatttctggagcatctttgaaagggatccggatcatctctctttttagggatattaatcagtggcgtggcgtgaatagtcgattatcgatatctcgccatttgaagctacggtaaaaaatcgattactaaggtgtttgctgcgaacaccctgatattcgatcttttttcataggtttaaatggcataacaatcgatatattgcaattcacgccacgccactgatattaatggcacagacaacgttccttaaatgagccacaatgtcaaaaatagttgtttcttattgcaatatgtagtccaatatacacttatagtgaaatacacctccagaattgagaattttttgcaacgatcttaaaagatataaaattaatgaggaatggaacttgcgatcaagcgcggaatgtcttaaaccttaaatcatactacaaacttgctgaccggaccctataagactaataagcatttagaggttctcggaaatccagtctatggttgagggcgacacgttatttgttttgatgatcgagtaaaaaatgattttttttgtctcctcaactagccggttttcgaccagccttgacgtttattgaaagtaatttcaagttgccaatttttctaacaatttgaaagagcagatagtataccatataatttatcgtaggtcgcttatcgaagaattttggaaactttggacaaaaaattccgttttattgcgaagtttatttctgtattcagagagaaaatatatgcaggcattggttggtgttaaaggtaaaccgtacttgtaagagtgaagactcttgattatgtaattattgtctttaaattaatcaagaacattttggaaccaagaaggactaagtcgttatatacttggactgttttttgcaaaaaggacctaataacatcgaaattttaccaagatttcgcaacctctttgtttacaatatattaggtgaatgacagaaaaaacaacaggttttatttagttaaaacaggtttagaaaacaattcttagcttagaaatcgaaattgagcaaattttcaggaatttttctgcacgataccaagtgttgcgcaattaattgtgacagcaataatttccgatgatatcaatttctttttgaaaaatgtggtttcgctgtgcgtatggtgaattttgcaataaatctcaatggagatcgatacctttaatttaattctaatttattttacttaatattattcattactgattataaacaggagctgccagttgagggtaagatacacgttaaaataaaaaagaataaaaagttagataggtataaataaattttattggaccgtgctgtgtaacattttacgagactttctctattcgtctgacctggcatgtttacttatcgaaacacgattttgtatcacacgctgaagaccctggttcagcaatggaacttcctatctatactataagctccaagacctcctaattttgcaaaactggtgacgcttagttccagcgttctaccgggccgattttcatgatttttgcggttatcgnaaaaaaaaaaaaaaaaaaaaaaaaaaaaaaaaaaaaaaaaaaaaaaaaaagaacaattagtttggttttccgcggtctattttgaaaaaattatcaattaaaatcgaaaaaaaacttaaaagaggaaccgtccatttttgatgggttaaaaaatcgattctgattaaatattcggcaaccgaaatcaagttggctacaaaaaattgtgttgccactccatgtgattacattcgacttctacacgtacacaaaacctgacaactctcgatttttaatggctgctttattcggagcgatcagacaaccgtcttgacacctaacctaggacaacctgacgaattttttatagctccaattagtttgtcttttaattatacttgaaatttcacacggaggtggttcacactgaacttgtgccacacacacttcagtggtccgttaacaagcggctactgccgcattctttccaatttgagctcgggagtaaatcatgagtgatgtcccatttaggacacgctgcgagataaaattacacatagtgaaccgacggattaagattaaggtgattcgatggacgccatattttgtgtcagaacggcatgcgatatatcgcatcaattggttccattttttcagctactcgtcatttttctccaattttgagatcgcaattctgttgtcaggagattaaagcactcacttaccaattttaacaaataaattgaacgcgataaaggcgtggttttttcagagagaaaatatcgcattcgagtgcagtttcgatatcggtatcgaatgcgatgttttctctctgaaaaaaccacgcctttattacgttgaatttctttgttaaaattggtaagtgattgctttagtctcctgacaacagaattgcgatctcaaaattggagaaaaatgacgagtagctgaaaaaatggaaccaatcgatgcgatatatcgcatgccgttctaacacaaattatggcgtccatcgaatcaccttaagattgctttaaaaggaatatattatttaaacagaaaagattattttaagaggaatatacagggtgtcttctaaaacaggctggccaaaaatcagtacttttacggtgctctttcagtacattcccatcaaattcagtacctcctcaaaagaaaaattcagtactttctcaatacctccatttgacgaaattcgaaaaatttcgaaaatttgaaattctcgctcaaactgcaacaataatggaaaaaaatctggactttctctcggaatttccgcattccttcagtacttcctgacgacctttaaagaatcagcctaaccaaccaactaatgtagttgcctttaccactactagtggtgttccatatggtttataagccatagctttttgtcaatacactcaatataaaagaagatgtaattctctcttggaaaacgaccaaaagtggcaatttcgtgtcgcagagcactggggcgtgccgataaaatactttatacgcatttaagtctccgtaaactacccaatcaggttctgtgggttgttttgcttctctgcacattccataccttcagactccgtataatgattgaactagactaaaaatcagtggcagaactggtagattcgaatttttccatttgactcttccctgtttcttctcctccctcctcacgtgtcctcgtctttcttctttcgcttcatctccttttcagttttctgtcagagaattttcatagatctttctactcgacttgtgtgtgtccaacattttatctctagacgccgcgccgcgccgcgccacgacttcgctgctgagttcgcatgcatgctatcaaaatacatgcatgaattctattacgatactattaattgaagagttgattatttaatgtactggtccagctatcgtaaagtggccgagacagaataaatgacacttaataggcttatataattgatacacggattttcttcttcttctcgtatctttttttcttttactttgcttttcctccttgctaatacttgtttattagcaacaaagtacacaatattccatctattttgtacggtaaaggccccttagaaactattttaaaggatgctgagctgggctcaactcgtgcctacatgcaaatttttaaaaataaattcgaaatacaattttactttggtgacggtattcattcctttttctagacttctattgactatgcagagaggataccgagaatacgtattaatccaaaaggcataaaataaaaaagaaccacgtggaaatgggtgagaaaatttgaaactgcgagcgagcaggcaggcttaggagagtaccgcaaaatcacatccaacgtgagtcgaaatatttttgagactgttaaaaaacatattccctacaattttttaaaaaaaatgtttaaaatattttcaaaacatctacatgtttcttcccgcggagtatccaaatcttgtctgcattatccaaatattttcaacatatttcgaaaatattttccacatattttgagaatattttccacatattttgaaaatattttcattctaaacttcaaaaattttgccgggagatctcgtcaaaacatttcatgaatgctattcgacaattttttgttcaaaatcatgcctaatttcgggtggaatgccatcgtcatggcattattttttttcctgataatgggaacgcaaaatttgggttatggaggcgccgggtatcgatcccggtacctctcgcatgctaagcgagcgctctaccatttgagctacgcccccagttaacaacactcacacgcaaacaccaatataaaatcaccgatcacaagaagtaaaagtgcgactcacaaagagagctgcaccgctggcggcaaaaatcatttacgttaccttgatatttagttcgctcgttcgaaaccagatcgagctgagtcagcgcgcgggccgagcgtgtcaacggacgcggaaaaaaggcggcaaaagggcgccggctgatgaccgagtaaccgagttatgaatggagtggggcggggctaaggagcgcggccgaggggggggggggcacccgtgagggtttggtcctccggagccggagcggtccgtgacgtcatgacgcgtggcgcggtgcaacggtgcacgcggaatgctccgaatgcaagagcgaattgactgcactcgtaaaaatcttggagtggaatccagagatttgggaagatttaagattcgtacacatcacacttgcctccactaacaaatcaaattgaaagctatgcaattggtgttcaagacatggatttgaagttacttttaacaaggagtgtcagtcaaacttctttttaaatgaattacctggcgaggagctagatcacaatgccaaaaataattaaaataaatgtagaaatgatgaaatttcaactttttttccttctttttcttggaagatgacaatacttactgtacccgcgaggggagtgagaaagtaaaaatgaatggatcgtattcgatgatggttcaatattagaagctgaaaaagaataaattccttgaaatatcactgttcattgccttgcaatattcataagaatcaaaaatcaatcacgaaaaccggttcctacagataactcatttgacttttgaggctatttttatattttgaaccaatcgatatcgatactatctcagcgatggcatgtctaattggtgtatcgaacacgcgcatccattatgagcgagtctaatcttacttgcaatgagcacatcacattctcttgccaaaagatgaagacccccaaataaaatgtagtgatccaaaaatgaactggagttaattttccattctaaatgttatgaaagaagaatagttcaaccctttttcttctccgtcgtatactttccgttggagttttttagccatcgtgcgtaaaaagttcagcttaaagctgatatctcactacagagggaaaaaactcacacacaagtacaattttccctcgaagagatacgctgtttggtgcaacactagtaacaaccattcaggaaggcaactgcaacgcgttttggccttgttgggccaatcctcagtgcagcgcagcgcgtctgtagtgagatatcagctttaggctgaatttcacgcacgttggctaaaaaactccaacataccgtcttacgacccgtgcgtccaccgcaattagtttgtgtcgtatactttggtatgatattagtgaaaagttgcaatttttggcaaggcgttctattaatttctaatctaacagaggatggcattttacagcaaggaatattttgtgtgatttcaggtcctgttgatcgaggctggacgaaacgagaactacttgttcgacattccgctggcgacatcgtttctccagttgacagacgccatcaactggaattacacgccggagccgcaggccaacgggtgcttgggtatgaagggtggcagatgcgcctggccccgaggtgagaactcaacgaatttcacttataaaaccggtaaattcatagtctggtcataaaaactcctcgacgcgaatattcgaaaacaaattcctagactcaaccgtgtgaattcctccataaatccgaaataaacgagcacagggttgccgaattggactacattttgcaattaggagctataacttccggcccggttaaaaaacaacgtacgtgccattagtttccctctgcacgtaagtgtttttttaaatgagccagaattgatagctccaaattgcaaaatgcagtccaactggtatcgggctctaagcacattttacaaccgagaaattttgggttgaatttgaccacattttgcaaaaaggaaccacgatttttggctcattttagaaagaacataaatgccattggtttacctatgcagagaggtgcttttatggaagggccagagatagtggttccttactgcaaaatgcaatagaattgaaaattttatttcatttcaagtaagtaccatccaaatgcccggaatattaaccgattccgagctatccgtcaaacccataaaataatggtcgattgcctgccctttctttagattttgagggtttcggggggagtcttttaattgggcgggggggggggagttggattctcgtttaggacctcccataggtgtaaaatgcggtggaaaaaagttccgcttttcaaaccgcataaaaacaccgaacgactgggctgtgtcaggcacggtcggtcataattcagaaaatcaaaaaatgacagaaaattagcaacgtcgcaaagtgagttgcaaagttttgtggtttggccgtagatatgctcacataccagaataattgtctcgttgtaattataaaaggtcgtccttaagcgtagcagaaagccggagtcaaaaccagacagctcatttcgccttcaatttttatgatacttcaagcacacccataaagcacgaatagtggtatcacagcgccgtatgagttcgagagacttctctcatctcttgattaatctcatctcaacggtatttcttacgcatgtgtctcgctttgatagtgtcatggaattgaggaaaaccatcaataagataaagtttatcaaaaagtcagggatagttgtctcgttttgatggaaaaagtgatttacaattccatgatttcagccgtctaggaattcaccatttaagtgtggtcagtctaggagttcacgcctacccatctaaacttaaacttgcccaacgcactcaggaaaagaccatccgaatttttcttaccgggtgtgacttagaacaaaagggtgataactaaaattttaggagttaatttaattttcgatgtgcctaggaggggtttctacatgtgtgaagatatttggtggaaatttctaacgccagacgcccccccccccaaaaaaaaaaaaatcgaattacatgcatttgttatgggcaacgtgcggacgtccgggtctcgggcaacacatacattcctattacattaaaggcgcgttctgattatgccacgaagtagctattttctttcttgagagtaaatagcatcattcatttgtaaaaagcagagtttcttgtttttttcgcaaataacatgcaaccaagctcggactgactataaggccaatctgccattggcagatacgccgccttgatgcgccaaaaacgcgcccctctgacagatagcaaaataagaagagaaaaacatttacgaccgagaatatatgcggaaaatttctaaaatgaacggagaaagagagagtaaggagtaaagagaggtgcttttacgtatgatagtggtgagcagaggtccaagaactactttctgaagcgcaaacactattttctgtgaaatgttcacctttttgttgacgtacaggtgctttattatgcccctccttcattcgctatgtgtaactcccttagaagcgttggtcggtttgatttttaagcatacgcatcctttatagacctctcgagagaccctcaaacatatttcttccttttcaaaatgactattgatatgaacataccatagcgtatctcgggcaaacttaaccttatttatctcgaaatacaaaaataagagacatctaaagtgtaaacgcgatacaactattgacgcaagatggatgtctacatttcatatgaaaaatgtaagacacgatggcgtgagtcgtgaactcgcaatgctctgctctatgctactagtttgaagaatcgttacgaataagaaaagcgcaaaccaacacaatgtggaaataaagcgagggaaaggatccacgttaacgacggcgcagagatacaactattcgtacttgatggacgtccgtgctgcgtctgaaaaattgaaggcgcgatgacgcgaagcgtgagctctcaatgctctgctatatgctatcaatgaggtgtcgctcagattcgggagaaaagtttaaaaagaagcctgaacacatctctcctactttcggctgtgttactcacgaagtgcttgaagcaccattacggataagacaaacggaaacaaacacaatatgtaaatagagggagggaaaggatgcgcgtttacgacggcgcagaaatacaactattcgtacttgatggacgtcggtgctgcatctgaaaaattgaaggcgcgatgacgcgaagcgtgagttctcaatgctctgctacatgctgtcaatgaggtgtttcggcggaaaagtttaaaagaggcccgaatacgtctgtcctgtcttcggctgtgttaatactcgttatctttcttcttttttcagtttcttgtctgaatctttttcaggatagatttgcagacccacgtcttaagctcgtgtaaaccacagcactggctcggttcttttagaaataacggtgcttggatgcgtctagtggctttaattttttatgttttcttaatttcagaagtctgtcggttacgtcaatacgttcaattttgcaatttttactctgtatgattaataaactttgagtctgaaaatagcgtaaacttgtgctgctttgtcaaaattttctgaactcccctccatgtagggtagatgccctaccaggaaatattacattatgcccctttaaccagccaagggtctacgccctcagatgcgagccagtccgaccctgcatgtaaaaacatttctcaatgagcttcgctgcatcgattccgtggaatgtaatctttgtcgtagaagttatgttttttatgaaatacttgcttcaaagtcgccatacatcacattagtagaactttcacaagtgagaatacatttttcaattcactaaaattaggagcatgcacatttttgcgatttaaagaaaaaactcacagatttacagcacaagtacgcttaatctcatacctgaaacaagagagaaaacggcaaagttagacaaaattgtgtaattgacaaaaatacaatagattgaggctaaaacgcagtgtgctacttaaccattaggtccagcaggctttaggccaaaatatcagggtggagatcaggctttcatcggccccaaaactgagtttgacttgatgcctgagtttttcctattgtgagtcatagaccgggaggttgccgttattttggtatgtaacttggaaatggacgacattttcaaaatcgacggaacttttcatcttgattcggaaaaccgagttccgtcatggccgcacccgttgcagtccgccgaaacagggctcttaaagggcttgacatatgcaagagctccatttattttaccgtggggcatcccctcgatatcacgaagtttgaaactgaatctgcacagggttgccacaggatttagaaaataaaattccctgacatttgcctgattttcctgacacattttcgcgaaattccctgacaattgaagatgtgacagatggttaagaaggcataattgaaaatagttttcaggccaaatttgttgttcgaaacctcaaacccaattctagaaagcaagtgaaggtgattcgacacattttccctgacattttcgtcatttttgtcatttgccctgacatttcccggtttttcctgacttttcaaaattccctgacacttcccggcaaacttgtgactgtggcaaccctgaagaagacataattgaaaatagttttcaggcaaagtttgttgttcaaaatctcaaacccattccagaaagcaaatcgacggtgtaagtcggcaatcacataaatcgtttaaggtgtctgaaaatctccgcctctgttatttttttaaaggagaaccaattgacatcattccttgaagtttatgcagaattttcttcacagagacaagaaaaatcacggcagttttaaagaattgccgttgagaagttttccgtttaaaaaataaagtatgacaggaagtctgcgacgtcgcaaaccgagttatgtgattgccgatttacaccatcgaaatgaaggtgatttaacaaattttccctgacattttcgtcatttttcctaacatttcccggttttccctgactttttaaaattctctgacatttcctggacattccctgactgtgacaaccctgacatgcaagagcttcatttattttatcgtggggcatcccctcgatatcccaagggttgaaactgaaatctctgctcccccgtttgttggcagggaaagtaatgggcggtagcagcgtgctgcactcgatgatccacacccggggcgaccggcgggactacgacgcctgggccaacgctgggaacccaggctggacctaccaggagctcctgccctacttcaagaagtccgaggacatgcagatcccggagctccagcgcgacaccaagtaccactccgtcggcggctacttcaccatcacctaccccgtctaccacacaaaactcgccgaggccttcgtccgcggcggcaagcaggctggcttcaacatctcagactacaatgcagagagcatctctgggttctcctacatccaggctaccatcagaaacggtaagaagcccttcgaggaccctaaagcatttggacgtatttctgttaaaccagggtgtctactaaatcaagctggtcaaaaataagtacttttacagtacttatccagcagtatattcgcgagaaattcagtacctcctccaacagaaaaattccgtactttttcagtgccttcatttgacgaaattagaaacatttcaaaaatttgaaattgcgacaaaaatgaaacaaattttaaacatttcggacctttttgcgaatttgcgaatttttcagtacttccggaccgcccttgaaaaatcagtactatttccggacttgtagacaccctggttaaaaggaactaagcgccaaattgagttccttttgaggagtttagaatcccggatagcgcgttctgtcagaaattgagaaaaacattgaaactagaaaatttcaccgacttttctccctgctgccgataaaattcagtgaaattttcaaacagattgaaccaacaatttttctgtaaaaaaattaaatttcgaaacgtagagtggcgcttaattgtgatgctttggccggaggatgacaacaagagtgcgttcataatgggtgatccataagtccctcactaccaacatcaggcatcatccctgtaatctttgggggaaaaaaaaaatgaaaaaagcagaaaaaaaaataaaaattgaggaaagcatcctggataggatcttgagattttcgaggtattttgtgcttaaactggctgagaaatgaaatcaaagaattagtgcaagcttgacagccccagtttgtgcgtgaagaagagccttcacttaaccaattgctcgacttcttggtcatcagtcactattaggaaaatctgagcattgacttctgaaagttacatggattgcattttgcaaaaaggaaccactagcattgcaatgttggtaagattgtgcaacttcttttgtcttggacgaaaaacccaagtatcccttaatagtttctattttactcgctaaaaactgtgaatttaagacaaaaattaccatctaaattttatagtatttttcacgatttccgcaattttattgcaaaggaggacgttgcacaatcttatcatcattgcaatgctagtggttcctttttgcaaaatgcaatccagttgttgcactaggtaccacaattaattgatgggaatggtccacaccatccatcgggttaggcgcaaaccactgacgtccattttccaagttttaggtttcttcgatataactaatacttttcaagatccacgtttctcattgcctcaaaatgaccttctaaaggcacaaaatgcccaatgacgttggatcgcgtagcgcccagaacaccctgatagccatttgtgacttcctaactagtccctacatctgtcttctaggtacacgactgagcgcctctcgggccttcctgcacccggtgcggaaccggccgaacctgcacgtgctgaagaacacgctggtgacaaagatcatcatcgacgaggagacgaagaaggtgcgcggcgtggagttcgtgcgcaattcgcagcgcttccgcgtcaaagccacccgcgaggtcatcctctcggccggcgccgtcaactccccgcagctcctcatgctctccggggtagggccccaggaccacctcaaggagctcggcatccccctgctcaaggacctcccggtcgggtacaaccttcaggtaggcatcggaatcttttgaatttattgaaaatatgcggcaaagaatggagctgtagcatgccacggagatggacaactggatcgcatttagcaaaaaggaaccaagatcattccaatgtcgctaagatggtgcaactatttttaccttgcaaatatagactgatcatctaaacaagtttcatctttattcccataaactataaattcaagacgaaaattacctttgtaaatttaattttgtacatagcttcggtaatttaattgcaaataatgtaagttgcacaatccaagcaacattggaatgctcttggttccttgttgcaaaatgcaatccaacttaaatactatatccgacataaaatttcgccaaaatcaaaccttcgatccatgttcaggacgttattggatccgaaaatagaccaaaactgaccaaatcataatatatttcgtaaaatataaaccttccattcgcaaacaatggagatgtcgcatgtgtgaggaatttccgatttgactgttgattttatatgtaaaaatttgcgagaaacacgatggtgtctctggttttctctgagatcaactctcaagctcaaaaaaagctatcaaagtgaggccaaaatggaggggatatcccatatcccaccctaccctgagagtccacctctacatcaagacaaactctccatgcaaagatagggagcaaatacattgacagggctgccactatatttggggacttcaaaactgaaaacacggcatcactgctgcggcatcaacttgagagtttttttgagcttgagagttgatttcagggaaaaccatttgcaccatcgtgtttctcgtgaacttttacagaagaatcaacagtctaatcttaaattcctcacacatgcaacacatgcaacatctccattacagacgtgcggaaattcagcgagggtgccacggaaaaaagtatcacaatcccaactacgttccaggctgattttggcgtcagatgtaagagtagctgcaccagtcagaggtaaggttgagtccgtcaaaagtgtggttgggtcagccatacctttagctagcgaaatcagccaggagcatagttgggatcgtgatcctttttttcagtgatggatccaaaaatatcctcaccgatatccttcctttaaaaactgtaagtatttattttaattttggcatttctaaagacgctttctcactcatccacaggaccacattgctcttggtggcttgactttcctggtgaacagtaccgtctcgatcaagatggagaggatactgcgaagcgccaaggcactgaatgactatgccttatacaaacgcggaccattggccgttcccagtggatccgaagccattgccttcatagacaccaaaagaccttttgaccccgacggctaccctgacattgagttcctcttcatcggaggaagctacccctcaaacccccttcacaggtatttttcgatttatatttgtattgattaaatgcgcctacatgtaaaaaaataccaaaatttattcatcatttaggatcgatttggaacctgtagcgcattttaaaaatcatcaagttgctttttgagagtaagacactcttaactcaaagccttggatagattgagtttagcaggcgcgcatcaagtcgcaacgagtttaaccaagaaaaggagactcaaagttaccaacaaatccttgctcttctgacctaaagccgtacctcaatttccacttacttgaaccatattttacgtataaagccatgctttctggagctcatgcggagatcgagatacgcccttcactggaaaaaaaaaaaaaaacacattggatctagagtccagactctcgaaaacattgacaagaaaaaatactcttgattcaatcggatttttgcttgaatcaaaacgaaatccgctttaaagaggcttggttcttgatttaagctagattctgatcgagtcaagagtactttttcttgtcgatgtttttaagagtctggactcgcgatccaatgtgtttttttccagtgttacgtcaatggcaatacaagactttcatgctaaggacaaattttaactacaaaattcgtagtcaaaatatatttttctagactttgagttttgctaggataaaattaacgactactaaaataaacaagcagtgagctccaacacaatgtgttgataaggcgcgtcattaactcgcacatatcaacccctttaggtttcatttacagagatttcaaaaaaggcaagcagcacaacaagagaattcacgatccaacactgcaaggtcaacgacgcaccttgacgagaccgtgtattgtgaatctagaaagctattcgaacaaatttaagttttttgatctgcctcaagcaaaatcttatcagattcttgaagaaaagtgctacggaaaaatttaagcgaagaaaggaaaaattctgtcgaactcctagaagataaagtcgacttaaaggtattttggggctaaaatacccaaatcaccggtattataaatcccgttatattattgaaaagaatttgactcgatataaatgcaattgtattaaatatgtcttgattttgttattttaaacgccttttcatgcaaagaagctcaaccatgtccatgctttattcattcatgaattgaatgtaagcaatccacatcccgaaaatctaccgatttgccgtaaaaatcgcagaaacttgatataccaggtcgatgtacccactctttgaatttaccaatcaatttagtgagtgcacgtatgtgaaagtcaaaatgctatagtcattttgggtgcattcatttttcatgaaacaattgttagtaattttaatcccgaaaaaccataaattttccgtataaaatcgaaaaaatcaaaatatgtcgactccctgacgtgaaaattaaattctacgtgtgaaaatacttatgtatcgatatgctgaacagaatgctcgcatctcctcgtaatttacaaaccgttcctatactcatctcaacatttttctcagagctttgtgttgtaatcagcttccatttaaactccggtttgatggccgaatcggctgcccaaaaagcaagccatttttgaagggctttttgaagggctatttttcttattaaaaactaagaaaaatatataattacgtagtaattataaataaataccaaaacaattatcaatagatgtcaaagactgactgaaaacttttattaacctcttatgtgaaaatatacattttatcagctgacactgacaatgttgtcagatgaacagcactatcagagcacggataccaacttttgaaaagtataatcgaggttacagatctgtcaaagcaacgttttgaacaaaacggaggagttaaattctcattccgagagtgccgacctgctcaaccatcctcgaatcagttcgcttgattctgcttatatatgcatattttaaatcagcgcgtcgcattcttaggctttttttaaaaaaaccaagtaacgtagactcttggtattcactgcacataaactagagacccccagaatgagaaacaactttaaatcataattattgacggataaataaactttttacacgctttggaaaatctgagaagttcgcggtagtcacttttcggtaaggaactaagggactcggttattgtatcgagcagggttcgaaacgatcgcaaaggcggtatactacgtatacgcgccaacagctactcctaaaacatttctatctgaaatgctacttgatgcgattctgtttaactgcaagccgctcaattatattatagggattaaagtttctcgagtgtcagaaatggtgacggaaatttccaagagcattcctggaggctcttcaaaatgagggagtcattaccatgtttacgtgtcttgcctctaggtcgaagttcttcgggaacgtaggtttcaggaaagaattccagagaaaatgcatggacattttctctggaatactttcctgcgtcttaagtgtacagatggaagtggatcgatcttaacactcaatctactactcaataactcaatcaatttgaggtgcctcgcactcaaactcctagtccataaactttcgagcaaacgctctttaattgctgctgttaatgtagctcaagaggtcgtgaatttggattataaatttgtgattaccaagaaaatcagagaaatattaaggcactctttggacgatgaaattatgggcagttatcgttaagtacgaatattgctaattctcaatcgccatgaattagtagcctgcgcgatattttttaatggtgaggcgaggctgtgagtatcatcaatccgcatttatgatctccagtagagttctcgccaaaattcgtctcggaaaattccggattgaaaatttccaagcatgatgagttccacttagcgccgctcgtgccaataaaagacagcccgtaatttcatcgatttcatcgtgtaacgtgagattgcctaattatctgagtgagatcaatggcacatctctgcaaattgatcatgtcatatttagttagttaatagttgtaaagacaacatcgttgatttgtgtggatgtgagggatctcctagaacctccctaaatcacgatgtaaaccataaaaaacctcctagggcaaagagctgtttaaggaacgactaagaacggccctgtactgccgtattaaggagaaacgccgaaatagccttcagacgtcaccatacttcctttaataaataacgaatcaactgggaaagatgtgaatattcttcatcaaatcggacaatgcatgtgtttgcaatttaatctaaaatatctaaatttcaagggaaatttcgcatgaaattcttcaaaaatacatattttattcgaaaaaatttgaaaactctcgaatgttcttacttcgttctttcttagcacggcagtatatcatccctgcagtaattttgttggacaagcacaagtgaaaccagagggagcgccttcaattcattctcataccacacgtgcatccatcatccacccatattctacttaatatctgacaacatggatttctacaggtacatattccggatcgaagacacgctgtacaacaaggtgttcctgccgatccagaaccaggacgcgttcatggtgttcccgatgctgatgcggcccaagagcaccgggcgggtcatgctccgctcggcgaacccgatggccaagccgctgctcttcgccaactacctcaccgtccaggaggacgtggacaccctcgtgcgcggcgtccggtggatgcagagggtcgccgagaccccggccatgcagaagtacggagccaagatccactccatccccatcccccagtgcgagcacttcggcttcgacaccgacaagtaagtatcaacccttctatctaaaacttattcttatatcgtcaccttcgccttccggccaaagtatcacgagtgccatgcgaagttccaaaattaccgtcgccatttatttttttacagagagattgttcaacgaacctgtccgaaagtttcactgaaatttctttgtgctgccgataaaattcagtgaaattttcgaatagattcaaacaacaattggactgcattttgcaatttggaactataaattctgcctcttctggaaaaacacgtatgtgcttagggaaactactggcacatacgttatttttaaaccgggctcgaatttatagttccaaattgcaaaatgtagtccaatttctctgtacaaaaatagaatggcggcggaaattttgaaacatggcatggcgcttgtgaaccaatagccggtaggtcctcttctttttctcgtcattctggcaacaagctggaaccaatcgcacattttgcagagattgccagcattttcaaatgaaaccgtacatttttccacgaggtaaatcgaaaattttgctgcgctgcaaaaaacgctggatcgttagagacggtctgcgttttgaaactttcgctcaattacaaaatgaatttttcactcgctcatcataacaaaagtgagcatactgttggacataggttgagttctcgaagctcacacagtttccgtggtgtagtggttatcacatccgcctaacacgcggaaggtccccggttcgatcccgggcggaaacaaactttttatacccaaggcccaacatatgattttcgttaataccaatcttttacaaataataaactccatttcgtccgacagaatggaatttttttttgtttcggctccgttccgattgatggaaaatataagattttagaaatgagccgtaaaaatttaacggaattgtgagtgatggttgactttagccttacttaaatgagatctcgtcgtccccctgacatgagggtgtacctcaattttcacgtgagccccagtagcgtggcgtgaattgcgataaatcgattgttatgccatttaaacctatggtgcagaatcgattatcagggcgttcgctgcgaacaccctgtatatcgatccttttccataggtttaaatggcataacaatcgatatatcgcaaagcacgccacgctgctggtgagccctgttttccataagactccatgctgtccaaggctcacgtggagatagagatacgcccttacgtcaggttacgggaacgacgatttgcaagtgcaaaaagaactgttaccgatgctcacgagagattacacttatttttacacttattcatgcatttcacttgaatacaattaagatccaaaattttccctccacttcctgatctcaataccatactttcaaagttttttcatgaaatccctctctttttcaaacgaattaaacttcaaatttaatgtattctttccttgtcctaccttttaattttgtgtgctacccttttgtgatccctactttttaaatgttttaaattctgttctatacactattttgatctccctctaaggtgttaacagtgtggaaaaatttcatgaaaaataaaatattgaaatttcagaaatttatgaaagatattaaaaaataccagttcggtttcatgttccacaaaatgtaaacataatgaacttcttcgatttttgtgtgtttgagtgcgggttgcacactctcgcccttgaaaaaggtgaaatatttcacagcctcgtgaaatttcatgaaatatttcactgaaattttcaatctttcatttctttcttaaatttcatgccaccctgcactgagaaaacactatggcttataaacctattagaggtaaatatggaacaccactaatagtagtacctctacatataataatagcacatataccttagttatggtacgtgtaccttaattaggtacagagaccttagtatggttcacaaaccgagaatcattagtttatttacgactattataggtgttccatatttacctctaataggtttataaaccatagttttttctcagtgtggggagttaatgacccagatgttaaaagcacctttaaataaacgtacctaccaaccaacctatttcctttctagctattggggatgtcaggcgaagcacttgacacagacgatctaccacttgtcggggacgtgtaagatgggccccgagtcggacccccgctccgtcgtggacgcccgactcaaggtgcacggaatcaaggggctgcgcgtcatcgacgcctccatcatgcctgacgtcgtcacgggacacaccaacacgcccaccatcatgatcgccgagaaggcctccgatctcatcaaacaggactggatgaggctccagtgaccccaccactacagccgataaaaggttagttgctttgattatcatacttttcagtgccgccatttcccaaaattaatcccgaattttggaacttcccttggaattttcgaaattcccggaatttccagctgtttccggaattcttctgggaattccggggtttcccatcagtttgaccaattattggatcgaatttgatgattttttggtcaaatttgacgattttaggaactagatccgggcgtattttagaattttttcccggatctttagacaaaaaatcggagcttttggaaatcggaattaatttcgggagtccaagaatttttgttaaaatcaaatggcagtactgacttttggagaacgaggggggcgcgacctgggcgcttcgcgatccaaccctccaagcacttcgcgcctcagacgtatgggttaaggtataagaaccccgagttctggaatgaaaccggtagctggaatttctctgaagtttcgctggaataagcttttgtgatagaatagtggatggagcattatgtttccattaagtcttttttcttgtcgatgtttttaagagtctggactgtaaatccaatgtgtgtttttttttttttttccagtgagtattaaaattgacacaatcctttaaaattgacaatttcttggtggaaagcaaagaaaatatgctattttgagagatttttcaaataattatgatgaatcgtgatttttacaacattgtaaccgcactggttcctttttgctaaatgcgatccatatgaggagtcagggaaccaccacacgatgttagtgtggggtctctaaaatatctcgtctcctttgaaaagagggtgggaattttcggactactgggcggaatggttatgcaacggtcatgacacgatgatgtaacaccgagtaaaaatacccgaaatctttactggcctgacgcaacgcgatcgccaatgctgcgatcagttttgaattaaatcacgtcacacgtgcttaaatctcaaagcatagtacaactagtcctgctcttaattactccggtcgactggtgacttctacactcgatgcccgctccagttttcctgaaatccacttgaaaattccactggaatccgaatcgaagccgcttgatctctttaaagcagcattgaccgtcgcttaccttcaaaaactttatgaagtactggtccgtcagccacgcgcgcagggttgccgcaatgacgtcgtccctctcacgtaagctgttgtatacgaagggaaaacgtcgtatgagccttcagacgtttccaaatttccttggatacaatacgaatttatagggaaactcgaggccattgaggccaatttttggaccctcctcccccataaaagccaaccgatcacccctcttttcaattacatatgagatgcgtctaactatcccctctcacattcatgcaaaaaacgcattatggagggatccattggctggtttgattcaaaaagttcaaaggtccatgtattgtgtttttatttttcaaaagtttcatagttcacatgtgtataagttcacttccttacgtacatttcatgacaacttttttttttttttttttttttttttttttttttttggtggcattaaattcattatatggaaacgatcagaacttttcataaccattttaggagcctgcttcgaagggggaacttgcgcaagtcaaccgcgcaataacgacacagcgttcttaaaaagatattagacagcattttaagaaaaatatatgacgattaatgatggattacgattaatagcccctgaaaaaaatttttttaagacataaaagtttagcgacacaaaaattattggcgtcattgattctatcacctgcatgaatgcaaaacgatcatgcaaaaataaactgccagatcagttggaacgaatcacctttttcactcttaagaggcttgacagtggatgttgaacatagaaaaaattatgataatttcaactatattcttgaatagactttgccccactcagaattgtgattgcacctgctagaggtgccgatcaaccagcgaagtatagttgacttgacaacattaactatgcagctgcaatttgaattcacccccaaaaacagcgagctgattgttgaaattgatagacaaagaagacataagaagtatggagcgatcctattagttacgttgagtgtttcttaaaacacaccaagggagaaaataatgatctaactatagggtctcctgtggggagccgtcagttagtctattacctacctcctttgtccattgcaaccacctgattacaccaaggatccctccatatcctttttgtattcattggtgataggttaaaatatccaatataagaaaagttcatgagtaaaaaatatccaagtacctggaataagcgcttccaccgccaaaattaaaaaagcccaaacgtccgtttactgtgagttataattaatattacttaccatttaccttttggtataaattctccaaactttccacatcagtttcgtcttaaggctcgttgctaactcgatcataaaaagctatattccccgaggatatcgtggaatattgtcttcatctttaaattcttgataccgctggatgcgcttgaggattctgttctgatttgattatattctgatttgttcttgacttctttgaaatttgttgcttagtgcggttacgacccaagtccagtcacatgttgggaaaactgtaaatcaccgttgtttttggccttaataccgctattggacattccagatttttggacttgtttaagatatggactttttcaactttggacatttacctttggacattttgtcctattatctttccattgtctatcgctttgtctactaatttcaaaaatctgcccgcagattgaaaaggaccatcaaaaccaagaatttctgagagtgaaggtaaagcatcatcttatggtggaatatctgatattggctggttgactgtttctggtccgtcccagtttaacaattcaacgcggagcattttacgagaggagtttaaggttaattaataacgcggacaataaaccagtcggaaactaagactcgcgagaaattggggcaataaaacgcgatgcgataagtcgcatatgtttccgtgtactgacttgtacctacctgtcctgttgccacagttcccatgtttacattcatcgaaccttgatcgtgagcatggcttgacgagtacttgaaattttaaaggtcaatgctatgacaagttcagtagaaaaaattaacttatagaagaaaatcctgaatcgagttccttgaattattcatggataaagagcttcgactaatgtgcaacacgaaagtttccttttggaattgttacctgcttgttgttcctgatctagttttgtccgattttttactattggacgatggccattcgggagttggcaatttatttttttacatttcttaaggtgcttcgtcaagctcatgtgacgtggtcgaactgacatgcgatatatcgtatcgaataggtcaaaaatctcggcagattttgaatttttggcaaaaaaaaggacgatagcccctgcgcataggcataaagaatcattttaaacccaaaaatcggtaaaattcagagaaatgaaagcagaatagtatttggaaaaaaacctcgcattcgatacagctagcgatatctgttccgaatgcgaggttttttttccaaacgctattctgctttcatttctctgaattttgccgattcttgggtttagaatgattctttaggcttatgcgcaggggttatcgtccttttttttagctaagaattcaaaatccgccgagattttttacttaatcgatgatatatatcgcatgtcagttcgaccatgtcacttgagcttgacgaatcaccttaatataaatatgtttaagtgctgttttattagtacagcacttcaatattattaaatatattcttctatacccctactttgctaatattaatgttcgttttaggggtttctcatcttcaggtcctttgtttctttttgatcactccttgttacgtcctttgcgttcgagcttcattcctggtagtgaatcatcgcgaacacatgaaactcgtctgagatgtaggatcgtgcttgattattttcgttttatcgtatgttattctctcgataaagctcatcgcggctcaacaaaaccagggatgaagctcaagcacaaaacaacctcactaggagtgatcaaaaagaaacgaaagacctgaagatgagaaacacatcttccgaaatagtcatcgttcaataataaaaattgggacaaaacaaggagatcagaaatagcaagcgggtaaaaattatcataaatcctgataaaaaagaaaaaaatcaacaaaatatgaaagtttttactcaaagcagaaacaatatattttagagactccacagctacacttacaatctagaaagataagacttttaaattcttttatttttttttcagatgctgctgactgaagaaatcaacatgagatccgattgcgaaaatccgaacagcaaaaaatgcgtacaggtgggcggcccttggcgatggaagggataattaaatcaaaattactagtcgaagcgcacaagaacaatcaggactctagtcgtcattcatttgaagagagcgggacaatttttgcattttgcgaaattactcttcatgtcatcaaatatatagaacattgaaatgaagagcctccatgaacagtcgccacgctattaatattttcgggtgaaatttttaacacgaacataaggcaagaacaattttcgcaaaatcctaaaaaatcccagaactgagatggcgtttagtttttgattatatgggaacaggtgactgtaatcatgctcacaattggacggatttctaccaaacggagctatgtgcattaagacatgatccctaagacccataagaatacatgcataacggggctcacgtcataatgcaaatagttccgtttgacagaaatacgtccaattatttcatcgataacgacacgcaacaaaaatgatcataaaggcaaagaagagttccttacctcccaagacccgaaacccattgctgttggtctattttccacttgatctaaagacagaggcaatagactagtcagttaaataaaatatttcagagttccttcgagcgcgaaatatttttcaggaggaaagcacacacatttattattgtggtagtaattttgatcagttttttgactacacctttaggaatctttaatgaaattgaaaaatattcctgacatgcgacaagttctccggttttcttcttggaaacagtggcgtagcgttttttgcgatacatcgattgatctaccatttaaacacatgataaaagatcgataaactgggtgttcgcaatgagcacctcaataatcgattctttaccacagcttcaaatggggaaaaatcgatgatcgatcctgtacgactcgccactgctcggaaatgttttgcgtgagaagtaacactgtaactatgataagattctctttcctgacgtggcagaacaatttggagtaaatatcaccttaatatttggggcaaaaatcaccccgcatttgaacactcatgccacaatcccaatcatgttgagatggggtccaaacatcctccctgaaaactcctacgaatttatcgacgttaaatgcgtcaattttggtcgctgaagtcaattatttagtcattagtcattatatagtactctgttatgtgccgatagttgtacgaaccctgaattcaggcgcttgaccccagaaaggcaccttaagcacgcatcaacataagaaatgtacagttggttttttagatcctcaagaggcctgtgaaaaaggtctgggtttgccctaccccttggattgatttttactgattggttgcatcttttctgcagtggcgagctttgcgatatatcgattgatctgccatttaaaccaatggaaaaggatcgatcaacaaggtcttcgcgacgaactccttaataatcgattctttactatagcttcaaatggggagatatcgatagtctatcattcaggcctcgccactgcttttctgcaaacgattgtgatgggtagtaacagtgccttaaaccttatttaccggctgaatgaggggtcactgtagaaaaaaaccaaagtcaaatagattgtaatctagtcatttaattgtaaactgtagtgaagaatttgtttttgtacacgtttgttcggatcttattacaataaataatacttgagggcaattcctatgaaatttgtttcaaaatttgggcaaccatttttgagtttcgactagcgtcacctacgagtgcgctttaaacgcgtgatgtctttgatggaattgcattgagtttgtgaatagcaaaaatcggtggcattcatcaagtattgatccacaaaaaaattgacgaaaaaatcctcaaatttaaaaagttcacggtaaattaatacacatttttgaaactaagtgagttttcgattgatcgagtccaattatcacgacatctggagaggtgtctcaactaaaaacaaaatgattcagaattcaacgagtagaagttttctagaaagctgaaaatgtttcttcatttttataaaattcacttctaattatgtttttctcagtcaaaaaactacgactttcgaacaaacaatataaaatgatggactaattatacaaaacattttactgctttctaatcgaaaatccaaaagttttgattcaaaagaactaagagacttgtttgctctaggttaaaccctcaccagacctcatggatcctcgaattccccgaagtagg

SEQ ID NO: 28 - DNA, 7219 bp, Bemisia tabaci
  source 1..7219: mol_type = genomic DNA
cttcctaacccacccccgcctcctcctagagaaggccgcaaaactcgtgggaaaagttgagcgatcggacccgcggaaagggatcctagctcgcgcatagaaataagctcaaaaatagccggggctcggccgtagccaattttaaaagtcagagagggagtaggagaacttaataatagcaccgtcgcgactgagctacgcccctgccgcgatcatatcgggcccgggaaccatcaaaagggaattttttcgggcgaagagaagacagcttctgattggtcgagctacgtgccaaagtttaacacgtcttgaaacaatccttataattattccgccagtcttctgtcgaccataatacagtaacaatggtaagtgctcctctcttaagtaagaattctactattgctaaggccgatgtgaatctttttcgctgaaaacaaacgctgaccaccttctgtaaagttttctcttttttttcgaaattaccccgttctgatttccgccagtgttcacacgttgcgaaggattacgttgttgaagtgatttttttttctatctttccttgggaaagtgcgtgtgtttttcgcaattcttgcgtagttctcgttcggtttcttaacataataatgaaatttgtcggagtattagtgttgcattgttggttttctgatttgtcgatattttcactgggctcggttggctctaccgacacctgtttaaccgcgccaaatttgaaatggcgcgcccggataccccgcgcgctaacaaaaaatttcgccaatacattacttaacctaattatgtccgaatccatttctgtgcaatgcgattgcggttaaaagggtaaaatcgtgctttactatttttaaaatgcgggagaagggatcgcctccttgtattactctgactcaccctaggaagacagataacgtgtacttttactccacgacatatttttcatacttcatttttactatttcattattagtgctacttgcacaaagtaaagatcaacacttccatccggaaggtttgtaaaattgatatatatttccctaacgtgaacgatttattcgtttctgtgataaaaataactaaggaaaatcctgttagtttcaggggtaaaattggattccattttgtgattcggaactgtaaacacttgtgtgcatagggaaactaccggtacatacgttgtttcgaaactgagatggaaattgtagtttctaattgcaaaatgtagtccaattgcagttagggtactcggaaaggcaagaaaaggcaagcacagggtgggataaaaaagcacatgaatattcaggttgtttaccatcagtaaagttttcttaggcaaagctagtgggtttgcccccccccctcttaataaatttgtgatcaaaagtgactgttgaataccagaagcacctaatgaagggtaaatgggcccctgcctcataccccctcccctccaaagctgctcttgcttcgcttgtaaaattcctactagaacttaatctgaatgctgaggaaatacataatagtgatgcaaaggactcctatgatatcagttggagggagataaagcttaaacatttcaatacactaagaattaaaagaaaatccggagataaagattcctattacatggggaaaaaattaaatatgtttaaaagcagaatacatggcatgcagaatgtatggattttttttatttcgagatttttttaaaggcttaatctttgatattccctctttcatttccttctgtatttcctcctcactgataaaatagaagagaaaataacatacccaataaattagtacacaagattttttttatgtagcggtgacaattcttcatgagagagagaaacaattgattgccttcaaatcaacagggtaatactacctaccattccaagtttaatgcagagcgtttcacacacttaatcacactaaagggcatctgcaaaaatgtgcaagagaaatcaggtttagagaccagcgttttgtagaagattcctgtagaaaactataatcttttttctttaaataagtagcacatctactaatatttgctgattcccaaagaggttattagcactaaataaaatgaggactccataaaaatatttgctgactacatttaatttctattaaaattgcaaaatcagatgatcattcatcttgatttgcaatgtttcaaaatttcaatttcctcacacacttcattaaacgtaggaaactcaatgattagcaggtgtgaaaactatgtaaggaatcttcttggttgtaactagagtacgctttcctatttcatgtaaaaacgttattttctcttttaatactcaaaatgggagtgaaatttttgaaataccaaaacagagatgtgtgttcttcttgtcacaggaccttttaactagatacctaatgagtttcagaaaaaaattcaaaatattgataaattgattttggaacctgacttaaagtttgaaattcaaaatattctcctatcttatgatcttcttaatcctcagttatgatacgtacctatgcaacaatcgaaatttgccaagttcttgcataagtgagattttgcggtttttcacttcaaattccttcacacgaatttacagaggtcagcgtgtggattcagtgtaaattgagtgatgcgtcgcagcttgttctataaatagaaaactttcttgagccaaagccaagcatgtctctcctatttgggttatcctccaatccatgatagggggccaaaaatagactttacatgacttcaaataatttgaacacacttgtgcttacatttcatacttttgagacatttacctttgaacttttcagagattgatattccacttatacatactctagaatttgaaagacatcttttttggagaaaaaagtaaattaatttaaaaagttggaatggagtttgctatatattaaaaaaaaatggtttagaactgaaattgatagaagcctaattttttacttcttcaaacccaaaaataaaaggttgatgatgtgactggtgacaggaaaaaagggctttactttctaaaaaaattttccagaggagaaaaagaagtttaagtgagaatcattagaacagtagcatatcaatggctaaagtcggaaaatacatatctccagttacgacatcgtaagtcttggctcatattttatttttttcatggaaaactaaacgacaatctctgctggaattttttataaattcccttcagtcattctaagaaaatcacttgaaatagcgaggaagaattttgtttaattttccttgaagaataaaacattattagaaatttaaacttataccttgcaatcgaggtacacattttttcctacagacatctagtatgcacaaaaacattttcgaaaaagtttagcgcgtcatctgcccttatggatgaaagaggaattttgcaatgagaaaggtgtcagatagctaaaacttaaacaatttgattagatttcccccgaaattgcgtatttttcttggaacaaccctagtaaaagtgagtcagcctgacgtctggctatgtttcataaactaccctgagtctgactgattcaggctgacatcagtctggcataagtctgaaatcagcctgaatcagtctgactcagcctggccatagcctgacgtcaggctgattcacttttaccagagaatcgacttactccacaatctagcacgatagaatttagacattttagatattagaaacatcacttcttgcagaaaatgaactgaaactttgggtgtctttttacaggcggataaggaaaagaagactaagaagaagaagaaggaggagccgaaagaggaggctccccctccaaaggaaccaactccacccccgccagaaccagaaaagccagtgtctgtaaagaagaagagttcctcaaagaaagttaagaggtccggcagtaatgtcttctctatgttcacccagactcaggtcgctgagttcaaagaagtgagtttgattactacggaattttaaatttattattctgaaaattgatgtatcatcgaccctttcttgatacggctataggagcaatcaatgaatttgctttagttatgcatctcaaccgaattgattttttacagcagaaagtgaatgtattgctccgttttgaagttgccagatctgcctgtatttatagcatttatggcatctgtgcaagcggatgaaaaacctaaatgaaatacgtaaaaaatataatctgaaatgagatttagcaatgcacacaatgttgcaaacaattcagagatagggcaatagccttatgtccttttgtaagaaattgattttaatagagaatcatttgaaaattatggaacacatcataaggtgggtaaaatatcaaaatatacaaggacgtatcagaaaaaaaaagttaacgatgatatcagtttcgactgtatgattaagaaaacttagataaaatttcatccattaaggtgaaaaatctacagatcaatcacttgataggcatatgtttcctgctgattcttaactatgattgaactattttcacgcatttttttatcctttaagcaacttttttccacatcttaaaatctgattgaatgtttcagggctttgctttaatggaccacgacaaagatggtatcattggcaagaacgacttgagccagacctttgaccaggttggtaaactcgtcaatgagaaggaattggacgccatgttggaagaagctcccggcccaatcaacttcacccaactgttgtctcttttcgccgctaggatgtcaggaggttagttttaaaatcctttttttaagttcaaagcatactttatggagtatcaatgaagacttagaggtttaaagaaaaaaatgtcctgtatggaatggatttttaatctttcaacttatgaagaccaattatgacccatcaattaaaaagagtctgttcataacactcctaacaaccaagaaaagggaattacgcagtgaatataaattattgtaaaaaaagagaagaaaaaatttcccacctcaagctatgagttccatgaatgatttcattcagatttagaaaaacaaaagtaggatcactgtgaagtaacgttacctcatttttagtgtatttttcgaagaaatacgctgttttgggcttgtcattttgacgattaaatgtcataattttttactagaatgaactccccatagtttttctgaatttgaaacaccttttggtaaaaacatcaaaaagaccttggctccagagctgatatgtttgttttcctcaaattacttgtaatatttgtccagtattttacatgcacaggcgagacacatggaatgctgttttgaaagtaggatgcagagtgttctagtttcttaatgtcacctgtcatggtcaaagtcactaattaatctaaaatcaggggaaaagagagttcttaaaacgttgcaattgaaatatgcattttttgcgtttggtcatctatgtagacctagtcctaatgttgatagaatgttataaacaagatgagagtatctaatatgctaattttcatttcaggctctgatgatgatgcaactgtgatcaacgcatttaaagcttttgatgaaggtggcatgatcaacggaaaagcgtaagtttaaacaagatttttacacattgctcctaagtaaaaaccgattcattatgcaaattttgcataggaccaagttacatatataattattaattgaggcgcagtatgcaagaagaacacctctaagtggcggtgcatcagaatcttggtctctaatatgagtctgagaggagaatgtaataggtggtttaaagaacattgaaagaccatgaagaatattcagttaaaaattcaaagaaatgcaagcattcgctttccttaaaatgaatgaaataataagggagctagtgaaacaacacaggtatttttcttgcactcagcgcctcaattgatattaatagtcgtcactaatgatatcactattgattggtagtatctcaacaaaatatttttctaaggcctgaaatcataattttaaaaattataacatcatggcatgagacattttatgaatattggccttgtcttgtgcgttgaacatattattatcttaaatgttaggaaactcactttatactcgaaatacagaaatggaatgagaagcatagcatcgatcgattgaactagttgccaggcaggaaaaaataagttgactgtcttgaaaacattgtgagagggaaaaactgaggagttatagttgagaagagaaatcgcaggaaaaatccagagcttttcctgtcattttaaaatatgaaaaaagaaaaaaatacagcggaaatggaattaacgaaaaagtactagtttgaactagcacagcacaagccaaaaatcctcaatcattgaaaaacaatattaggttttttttctattcaagtaccagagcaatagttaaaaatgcttgccaaatgatacgaaaaggttcaagtgtcagattcaatatgctaaaattagcttactcaatcccagaacacttcaaaagttgaaacctactaataaaaaatgaaattaaaaatacataaaaaaacgacgaagaggaagaggaggaatagagaacgtgaaaagagaagaacttgcttacacaatagcttcactcacttcatgagttgacagccaacaactaacaaatgaccattctgaattgaagctgtacttcaaaaagtatgtcacttaaaatttagaagacgtcactgattttaaaaacaacattgctttaagcagcatttgagacacttggcttgagaatcagtccacactctggtttgtggataacattttctgagagaaaaagaaaatacacttagaaaatgagcttcagaaattgagtttcacccaaacagggatacaaactattttctttagttttttcattcagagctgaagaattcattacatacttgaataataataagatagataattcatttatttatttattttttacagtctgaggcacgctctgcaatcctggggagacaaattcgaaaagaaagaagtagacgaaatctatgacaacttagatttggacgacaaaggctacttcgaaactgatgaaatcatccaacttcttttgggaagctccgaagatgaataaacaacaacctatccg

SEQ ID NO: 29 - DNA, 136136 bp, Bemisia tabaci
  source 1..136136: mol_type = genomic DNA
cgtaactttcccctgtgcaaatgaaatctaagtcagtaacttttgtaatggccatgttgccaggtgccaaacagctgttctgtgttgtgatttggaccgtgttctcgcttttcatcctcggcagctatgctggtaagcctttttccggcttttccgtatgttttctcgccagacgtcctagttttgccaaatcttaggtggctcgggaaggaagtcgatgtttctaaatctaatcttcgagctcctagaactgatgcaattgctcgcgattccaaccttactcgtactaccaacctatttagcactgagtgtcgaccctttcatctatgtgcacctcataggatttttgttaccttttttataagcggactttcggtgtcgagtttatagaacgcctcatagaagtggatctttcgctctgttttatttataaaaaaattatttagatttagattttttggaccctcatcaaccaggcaatattcagagggaaacggaacctagtgtgttggaaaaaatggggtctgccccttactaggttgacagaatcctcggtaaggtaggtaggcgtattttgagcctggttcctcgcatgaattgagtttcactcgggagcagttacagaggaatctaccaatcttttagactctctgtaatttaatgtaggtcctcatccagcaaagagaggaaccaaccaaaacaactacaacactaacaatacaatcattttttaacgaggctcgatttttctctttctcaataaaatgcgaagaaaatgttttttgattaattaaaattaaaattctggtactggaaatagttttcatgacaattgctatgaaattatgatgataccatatttagattacttaagtctgcagctatagactaatttgatagcctctcgtcgaatattatgcttatttgatcagcaacaaaacgtagaacgaaataattcctctgtaacaagaatgtgaaaacgaaagaatttataatacttatattttcctctaatattgagtcgaagtcgaagttaatggcaaaaaattccaccagtaataaacgacagtcataaacagacgctttgtttttatcagattctcacgctttattcgaaattttatattattttttatttatttttttattaatacttaaatgtcaactactcgacatgggtcctatttcttggaaatccttctcacatctttttgtaaaatataacttgaaaacttcgtgcgataactactaaataccagtcaatggtaaaattcgattcgcaaagtcacaaatcgtcccgttttgtttttatgggtgaaaacaaacaaaccatttttattttttatttttttcatgagcgtgctctttttcgccctttttagagactttcctcattatcaaattaaatatgaaaaataaaacattgaggaagtctcaaatacctcaaccgagaaacatttcaagttccgtcttcaacgcaccgtctctaacacgtaaaccgtaatccattcaggaatgacataaatataaagaagccttccttaacgtcggtcgcgacattaatggagcaaggaactcaatctgagtttatttccgacttcaggatgatgagaggagtgtaccctctcttatcgtccagctttggatacatttttggtgaaggtcggaacaaaatatcgaaagaaacttaacgtaaaagttgggcttttttgttggtccagcgttaaagtctccgcgtcatttcaatgataaagagtgcgggtgataatgtcgccgataaatcccctatccgcccgccatgagacaatcgtactcgtcatatctattgtagttttgtcgctttgctttaggaggggagggggtatagaaggtgaaggaggaggggggggtgcactgttcaatcgcacccaatcgtttatgaaattctcatgggttgaagtaaaggtttaggaacgtcaaagctgcaattagaagtttcgttcttttccgaatatattttcatcatgtgtgcctggtgtccaccctcctttctgatgtcttccttgcctccaggacaaaccacgaggactccttgaaatcccttgaacaattttaagtaatttgcttaagagctgttgaaatgcgccgctataaagttcagaacccatatggaaaaaaccctatagctagtatgaaaaaccgaagtccactctgtatatgaacttggacacgtttatttcaacttagttgaccgtaataattacggtcaactaagttgaaataaacgtaacacaacaattattgtgaagctgtttgtctccagatctttatctaagataccgagggaaagctctgaagataataagagaaaattcaggatgatctgaaattattaacgccgcaaaatgaaaaggcgtttatcttggactaaaataggagtttttcctccctaaattttctagaaatccccccctccttctagtacaaattaaaaccaattctgtgagaaaagtgttaatatacctatatcttattctgctcccaaggtggctttacttgaaaccatttgaagtagatcatattgacggtgtaagtcggcaatcacataactcggtttgcgacgtcggagacttcctgtcatactttattatttaaacggaaaactaatcaacggaaattctttacaactgccgtgatttttctcctctggacgaagaaaattctgcgaaaacttcaaggaatgatgtcaattagttctcctttaaaaagataacatagtggcggggattttcagacaccgcaaacgagatttgtgattgaggacttacgccgtcgatatggctctttcatcgaacctggatttattggcttgaattcaggatttcacctcttttaaggaggactcggagtgatttttcatacgaagtacatcgacccggtctgtgcaaggtttactccttcaagaatattcaaaggctttctttttttaaaaaaatttaggggctgttccgagaatgttgaaatttttcaatactcgtgcgagggaagtcagaaacaaataaggcaattttgatgtttgaattcgtctgcctctctattttgccagcctaggaaaatgcccaatgagtggtcggacgcgggttttgcaaagatttcattgataagaaatccattttatagaaaaatcacaatatttctccttcaaattctcagccatagaataatttgtgaattgaaatccctgaaaaaaaatccaagaaaattacatcgcattaattcttatggcggggtctattcaacggaggattcctattgtgtcttgaccgccaaaactattcgtaatgttgcagacacgctctcgacggataagacagggttctcacaatcagggaaatcgggaaatgttaggaaattttaaaaagccaaggaaaaccttgaaatgtcatgggaaaaatagttaagtcacctttatttgccctgaagaattgatttgatgtttcgaacaatatattttccgtaacaaatattgcaaatgatgtctttttaaccatctggcatatcgacggcgaaactaccaaaccacgtatctcgtttgcggtgtttgaaaatctccgcttccattttattttttgaagggagaacaaatcattatcgtcctttgacgttttcttaaagttttcatcgcacagagaagaaaaatcacggcgatttttaagaattgacgttgagcagtttttcatttaaaaaatcaaatatgacaggaagtttgcaacgtcgcaaaccgggatacgtggtctggtagtttcaccgttgatgtcttcagttgcaagggaattttaccaaaatttatcaggaaaatgtcagggaatttcattttctaaattctgtgccaactctgataagagcgtaagcgtaagccggcgtctgttttaccgttctgttgaccaagtctgctcggacgcaggtgcaatgcgcggtgcataggtgcgtgtgacgtagccaaggatgagtccgatgcagagatgcagtgatgcagcgacgatgccgccgcgctgcgacgcgcgcgccccggaggtgggaggcatcctccgtcccgattttgaaacggatctcgcgggccttgaagtcgtgaagactcctttggaagtcagtgcgggctcccggctccccgcttatcactttgctgcaccgcgtccacacctgagtgcatcgaagcgatgacgcgacctgatgtcatccgtctagccgcccaatctcagattcctcaatctatcggtgataaagctcctcagcaacgaccacgatgtcaaaagacccaaaatatgaacacggtgtcatgtagtgtcatgtagggtcatgcactggaaaaaaaaaaaaaacacacacacattggatcgagagtctagactcttaaaaacatcgaaaaaaaaaaaatactcttgattcaatcggatttttgcttaaattaatcaagaaccaagcctcttaatttgagcggatttccttttgatttaagcaaacatcttattgaatcaagagtattttttcttgtcaatgttttcaagagtctggactctagatccaatgtgtttctttttcccagtatgtgtcattcccaatccaagtactgttagattgggttaggtcaggttatgttagagaggtatatttacaaatgaagttcgaagatcagagctatttcttgcctaatgataattgataagcaacttgttgaggatataattctcttgagggtgactgatgaatctcagggtgagtactttgcttcgttggcggatccagcaaattggcaacattgttttttccatttaaacccatggaaatgtatcgattcttggtgggccaggtgctccgacaagaatcgattttctaacattggcttaaatggaggtaatccggtgttgccaacttgctggatccgcctctgatttgctttgctaggcgagcttttgcagattaggctctgagtttgagaaatatatcgatcagtacatccgttatcttcatatctatctattcttgattaatcatcactcctaaaaaaaaaaaattggaactgggaaaaatggactttggcggttttcgcaccgagcaggttaagtcgtaccctgaattttagggctgcgattttctcttggcttaaaccgcacgataaattgggaagtttgtaatgtcgatcctcagatgaggaaatgtaggcttggagcattgccatcggagagtgagatgggagcggagatccgacaatcgaaccgtatatatacaaaattagctaagcatcgattacccataaacctcggaactcatgtctcgtgaatagaaccacggttcatgagcttatgacgcgtagaccatttcttcagtgcactgttcaatccgagtcccattgtgccgtgcgtcttctttgacggctcgagccacggtaccacagaccgcgggcggcgcagaatcaaccgcgcggcttgttcgcgcgactgggtgcaatgattttaaaccgttgccccagtcgttgacgacgcaaatcgtctttttaatggcaagcattgtggaaataggaaattttcattgggaagggggctcaaagggcaagtattcaatgggggtctgggggtgctagaaaataccccactgacggggattcgaggggtctttcggtctttcctagtaccaaaggaggaatggggggttctctagtttcaaagaagatcttgcgtgtgtgtgtatgtgtcgggaatttgcgatgtaagtgctcatttttatgtaaaatttcgcgaaaaaattgatggtgtcgctgattttttctgaagcaaacttcaaaactcaatcaaagctctcaaatttgagggcgcaatggaggggatatcgcacgctatcctgagagcccacctctcaagttaaactttccatacaagcatagggagcagatacatccctggtaaaaattggcgataagagctgcgtttcaaaataccataggaattcttatagccggctaaagaaggctacagaaaatcttgtagctggctgtagaatgcggagaaaatcatacggccgggctatacgaagcgataaaaaattatgcagccgggctgtagttcctatagctgagctttacactttatcgcctggatgttgctttttcgccatcgattatgaaacgccataagaaattgtgtagaaattcgtgtgctttggaaatcattaagtttgatacggaaccaccttaatatttataaaacacacgttatattttcctttaacacgtatatttttttcatcaattaaaacgagaataatccatacaggatgcgcaaacataaaatcatgagttgaataacgctgactccgccagattaaatattagagccgaatacaaagcggagcggcgacgcactggcgcctacaaacctaacagggatacctcacgcattgcgcaacgcgtgaagtattcctgttaggtttgtaggcgccaacgcgcgtttcgcgctggctacccgcctgccgcaccgcagcgtgccacggcgcttataaagcaactatttcacgcagaggtattgcacagtatcatacgaaactgaaggcgctctaatatattaggaatggcaggcatccatcaaaagtacggagctttcctcgcaaaataaatcaagatactacggcccaaaaagagagcagtggtccaaaaactcactaaatcctagcatccgtaattagtgacgtttagcatacactttatcgcctggctttgagttgcttaattgccatcggctataaaaggctataagaaattgtgtagccggctatagaagctattggaaatcttacagccggccgcaggtctagcaaagttctttacttagcaaagttcctcaaatttcttgagaagtggcctacccttcctccccctcagtgacaaaggctaggtttaaattaaaaaatgcacccagttgcgcggttagtatcgcgccgcttcgccgacggcctgtagaagcgtagcttgagtttcacgtttcgagcgttccaaggcgcgctgaacaattaaccgagttccacgacccaaccgcatccatacacattcacttacacattcccaacagcacccagtctgctcatcgtcagtctactctctactggccgcgatatttagtctgtcccctgacggaaaggtacgttaagagatgagccctattgttcacatatcctattgagtccaagaactcaagttagagaaaatttgcgcctttacgtcagagggacaaaaatttttaccctacgaatatggctagtgacggatcgattctctatcccaacgattatccacttttagacaaccagtataggtacaccgaacgtcgtaagacctctcgccgcacatccggtgacaggtgagaatgtcctatttgaatgtctctctaaatttttctcaaaaactgatctcatgcgccttgtccttcaagcccctcatttgttcttggctccttttagcgtaactatgagtccaatttcctgagttccccggaaaagtcgaatgctgggactgggaaaggaaatcgaaatccatatgtgtatgcggacgctcctggtggcttttcacttttcagtgagcaccgtgtttgtatgtataagtgtgtgttcttcaatgaaagtctcccgggaaagtagattgtagccgacaggaaagttttcaccccgacccacagtccaacgaaaagccgcttgaaagttctgaatgcacacaacgtgtattgtaccttaacaaataattaacgcatcaaaaagatgtgcattgctcgtaaatgcctacatttgactctttagggacgcaaaacttcaaccgtgtctcgctatccggcgttgttggctctttgtccaagtttttaagttggtctacggaaaaatgtcggatttcttggcaaaatgccgatctcacaagaaaacattgctaaaaacggtcataacttttgtgaatttcctccgggctaaagtctagtcttacacagaggaaaataaggagaccatagatatggtgtcctgtgccaattttgaatgaaatcgaacagatagattctgagaaatcgctgtggacagatttgggggacgccacacggacggacacacattttttcaagtatggttatttttactcctgggaccttaaaacgtctagaaatgatgaaatttcaactttttttctttttttttcttggaggatgacaatacttcctctctaccctatgggagcgagaaagtaaaaatcgttgcacactcacagtgttcataataaatttcaggctccacctatttttcttgtggtagttgcggcagttaccacgttaccggcgatgttacctttgtggcaacaattttttaggtcccgggaccggaatgattcttaccttgacaggactacattttgcaatcagaaactacatttctggctcatttctggaacatcattagtgccattaggtcccccatctatggacgagccagaaattttagttccctattacaaaatgctgtccaaaatttacattttagatacgattataacgtgaggaggacctagaatccactatgaatacattttaagagcaacattcactttttctcgcggagatccgtggcatttttcatacccctagggcacctcttctgagcgctgtcaaagtgacggccattcccagactagctccttgaacgtctctatggatgtagctccgttttctgccgtattcggggatcctcaattagctttctgggggaacctgggggagttatgggcgatgtggcagacgcgagcgtgcgatgcgatgcgagccgagttccattcacattctcggttgcataatggaatcgttcttgaggaggtcacttaagcccgcttgcgccgtcggtgtgctcacccagacccagacctcagcgcatcttctcgccgccagcccaacacttgtttttcacttcacgtccccgttttacgattttatgaacaacgaccaagaggagaggggggggggcggaccttcagtatgagcaatgatgttcctaaaataagaaatataattctgggtatcgggtttctgaccgtttgtttaaggacggccctacctaccagaataccgctgcgcgccatcctctgcaaaaacgcccaaactccagcctagattttctcaactttttacagacaaaatgttttattgcccactaaccaatgacaatttggaccgcgttaagcagaaaagaaccgagccacgtcagctattgcccaattgaatcgggcaatttaatttgtttaatgaaaacggtcgtgtggattattgtgcacattttagtgcattttctttacagtgcgaagcgaatttcactaaaattttccaaggaacccgcacaagcgttctcttgtaaaaaattaaattgccaggtaaaatttggcagtagctgatgtggcgtggttcctttctgctaaacgtagtctcttcatccttctcacttctaaaatagctgtgacatatcgtcgcttctcagacgtaagggcgtatttcgattttgcgtgagccttgttctctgtacaactaaatgccatccgtggctcatgcggaaattgagatacgcccttacgccagaggagcgacgatatttgtcattgagaattcaaattcacaaaatgaagcatcatgggatcaggtttgatcagtctcgtaatacctagaacagtatttgtggaaaaaaaatgcatagtcttgtctcgattttcggcgtctttcttgtggacagcaaaataagcctaactacataagatgttgcctaattgcacgtatttatccagaatcagtgtaactacatattaagttgtctcatctcttctaaagtttcttttttagagaattgaacatcaggattccttgaaattttttgtgaatgtctgctagataatggaaaagatccaaaagtccaagcttgactgtttattgtttttctttaaaaaaaatgaaacgtgattggaaaggcgacgtcttgtgtaactagaatgattttggtttaatccgttcaatgctttctcttattttattgttttacgggaatattaagcaacattttctcttggaattttgtgagaatatcattcaaattataaggagaatgtgtgggtggttttaatgctttacattgctaagttttgctgtatgacaaaattaaacttatgagaaaggtagggaacatgaaatgtaatggactgcttctgggtaaacaagtcaaaatactgtaagtataagaacatgcgtctcgactgtgatttttcaaaatgaagaaagtattccgtactgaaagtaggtagtctttagaggacagttccggcataggaaaagtaatgtaatgtgtaaataaaataaaccgtcaatagtatttaaacagattaagaaaaggtagtcaatggaatacaatttacgtcagtgaaaaaagagagcatttctaggccactactgtaaaaaaaaaaaaaaaaaaaaaaaaaaaaaaaaaaaaaactagcagataatcatttgaaggatggatgcgagtcatactatattcgactcgatggtaatgatcagccagtcattctccaaaaagtaaattgagacaagatattcgcaatacatattgcaaaccaacatacgcggtttcatatttctgggtcttggatttcggccgtgcatcgacgctgatggcactataaaaactttcatctcgattgcgatgctgcaaaatttttggagtaatgttaagtttttcttttatgatattttcagagaatcccagggaggaaaaatgaaaatcacacgaaatttattcgataaaattcataggtcatcgaaaaaaaaaaacagacaaaaaaacaaaaaacaaccccccccccccccccaaaaaaaaaactaacaaacaaacatcagaaagtcgccgagacgccagaaaatgagatgtatttttattcagttttaccgtcaatatgcaagatacaagtgcattaatagagcagcttaaagttcagacaagattgaagcactgattattttgcctttaatagtaacagacactttttactttcgtaaaaacatggtagaaacaggcacactgcggtgagcgcatagtgaaatccgtgaccttagttgggtttagatcggaccggcaactaaactaactcggagacgaagcggagagtatcacaaaaaatgaaggcgctccaagtcgaaatcgtgctactgaaggtttctaccctttaaaccttcataatgttgatgcagattttcgcgatttatcgaaacaacatgtgaaccgcttgcagatcgccgtcgattgctaattgcttgcgacagacatacaaagtgactgcgtcaggggaaatgagatttcgattggaaacttttaataacttaccgtactttttcgtggaggctgaggagcaatctccatcctaagctcattgtcagtaaaaagagaaaaaagtcataattacttgataatataccttctaattttccagcacctcccaattcagcagcattttcggtatgttttcttgttaactataatcaacaaactttcccatgtgtcatgtcaatgtcaatccttgtgcttttggatcattcggggacttcaattcctcgcccacgcaaaatcaaaagaaatcaactatcacgtggatctttcattttggttttagcaggtagaatccttattagaataaatatcaaacgtttatgtcttgctattttttctgcctaattaaagtctttgaatcaaaagtaaccaaacacacatcctgcagttactttaaattaccaatatactactcctcctgatttatgtgatttccgcgaagtatattagcaggcatacccctactattccgtgaaagttggtccagtagcgcaacgtggaggtacctgggatttaaggtgtacaaccaccttaaacttaaaaaacacagttattccaccgttacaacgatagtaatgtcacacggaattccacggtagtagaaccgtggattttgattcttgtaacgatgagcacggtgatatggctgtgttcaccgtaatattactgtgggcacagacatactattatgagcatggttatgctactgtgctcatcaataatattaccaaaatccacggttacactataccgtggaatcccgtgtcacattattaccgtggtaaccgtcgaataaccgtgttctttttcgccgtggaaatatggaatactatggaattatttgggtggcagcggcccgaagctgtcgccatgaacgccacccatcaagttcaataatgtcgatggacgaggatgacattgagacgagattcgttttggcgatccgcgggactcgcaataaatattttgccggttgattagcacttgatcagccacacggaagtataatttgagagtgattagaatactcaagtgagcggctatccgcggaatgcgcaaagcgcatcgacacttgttaacggcgccgccgcgcgcgcatctcgtgaggaggtgcgcgggggcggagcatgcgcgatgagatgacaaaccggcacagggaaaacgcgagctcacataattcagccgcgataaatcatttttaactgctgcagatttaatcccacccggggtgtcgtcagagacatcaatattgaatcattcttgaaagtgttcaagcattgaaaatgaaaattcgagaaaatcagataaagctgtttggatcaacccattttttaaatctcagagcgcagaaaaattaatgtgtaaaataggcactttaaaattagattatatttatttcagaaactgtcttgtcgtttgaacaggataagaacaagaaagagaactggcgcgtgagtcttattcggaataaacggacaagtttaaacatttctgtcgtttaaacattcaaacatcaatagacatgatgtctttattgtactaacggagtcatcgtttctcaaaaaacgcggtaatgattgtcatacacccgtgtcattagcgcttgttctaatagagtgaaatgcgaaagtttgaaaatcctgcatttcgatagctatgcaattcgagctacttcgaagttaatatagttgtaggtatttctcatttttaccgctgtacattgttaaaaacagacaacgagtggtttgccagtgtgagggggagaaagttacaagcttataatgtttaatatgaacatctgctccgcgtattttaagtaataatttcattctgaccatctttctactttaacagctgaaacacagtgggcagtgacaaaaaattgttggagcctcgctttatcactacatgcagacttctcatcgcgtaacagttctttataggaaatcatcactattttaaaactatttatgtcgcctatttccgattgacgatggacctactgagccgtacataaccccatcttcattctcttcttgttttcctcttctttctccttgtcttctgatcgctagtgcgtctttatctgtcatattagaggagtcctcaactattgcacatacagtagactctggattatccggcttcgttttacccggactctggattatccggatcgattttgcaaccatgtaactacgtaagcattccgataagtgagcggatccgcggagaagcggtcgcaaggcatattggcgcctgcaaggctgaatgaatacttcacgcattgcgccaaacagtgagatcggcgtggaacgcattagcgcctactagattgcatgaatacttctcgcatcacgccaaacgcagtgcagtcggttagttggttagttagcctaaaacgcacattagcggctacgagactgcatgaacacttcacgcattgcgcgctttgatcgttgtattgtaatttatcgttgtcggctaccattcacaatcaccattgagtcgttcagtttggcgttaaccttttaaattcgtgttggtatgtacatgatgtatacataataagaatactgtggtgttggttttttcaaactccttgcgtaggtccaactttattctttaagtctattaaatgatatacaaaccctaagtccaaaagaccctcgtgtaccagacttaacaaacttttacgctcttacgcatctccagagtaggtaggagtgtgaagtctccaaaatatgttgtccctgatgaacaacctgtccaaacaccatggaaaatgaaggttagagacggcccctccttgagtgtgtgtgccgatgtgtttttttatatcgcgcgtagtcgacggacggagcgttttgcaagcggtaagaccctgagcgccggcgcttgatgagatattgggtgcatttgagccaactgtcgaggtattcaaatgaagctgtagatcatggcacatttggccggagccggagttgaagaatgcgtccgatttgagaatatttcctccgataagatcgtatctcagcgtgttcacgtcacaactttggattcggctgcgtagcgtcgtagagtggaataccgcatacctgttcgctgtttgccaactgtgttcggttcggccgagggaccgaatccatggtccaaacttgccccaggcgtgaacgcgtcgtcttgttctgccctgctaaggaaaaaaccgtacgagtgttcgaatgttgccaaattccctctcagaaaatgtttattcttaaggaaagttataaattattctgcctcgaaattttctgactatttacatcaagttacaaacaaaattgtctcaaaaattgaaagaacaatatttaaaacattttccggaaattcgtgatttttcaacgggaatttggcaacgtctgaaggctcttatggcgtttttccttaccacgggagtgttcttgtcaggtggacccaacattgttgtcgcttgtctctttactcttgctttacaagcctctgatgttgtgcttgctgtcagtgaaaaagacctttctgtatgtaaccaataaccagccgcggtaagggattttcggaggtacattttcccggaaagcgattcttagttagaactatttacttttgaaagacagaaaaataagatacctagatttaaagggatcatgttacggttttctttcgcagagaatatttccagtatttcgttggacgaaaatagaaagtttcaaataaaatgactgctggtgaaaccctatcttagcaaaagttaattttttacgattttcatatgaacacgcgactggctccaccgagtctcaatcggactttcgtcgtaaaccagacggcccgggtccatgtaataggatgtctacaagtagagacaaaagactctccattggtatcttgacaatggtggcagcttttactttcgggacttcaactttcaacttttgacttaaatctaccagatggatggttaacaacgtgttgagaatttcgctttacgtgcatgatgcagtcgcggcttccctctttgaggaggatcctataggcttgaaggggtcgctatcactcctagcttttactaattttatgaccacatatagtacgtcgcaatatgaggtgactctagttgaaatagccaatcaatcacataactctatatttccttagttttgtcttgtccagccaagtaacataaaatttcaacaatacaatcaggttgctactccattctctgaaagcttcagctttggacttactgctctctttattaggacgaccaaattctcaatcactctctgattcatccctagttctatcttgtccagccaagcaaaataaaatatcaacaatcaggttgctattccattctctgaaagcctcagctttggatatacactgctctcctcattaggacgaccaaattctcaatcaccctctgattcctccttagttttgtcttattcagccaagtaacataaaatctcaacaatcaggtcgctggtccattctctgaaagcctcagctttggacctactgttctcctcattaggacgaccaaattcgcaatcaccctctgattcctcgttagttttgtcaattccagccaagtaacacaaaatttcaagaaaatcaggttgctggtccattctctgaaagcttcagattcagacttactgccctcctcattaagacgaccaaatccttaagcacccactgattcctccttaattttgtctagcgcagcccataatagttcaacaatcaggttgctgttccattctctgaaagcttcagcttcagacttactgctcttctcattaggacgaccaaatccttaagcacgcactgattcctccttaattttgtctcgcgcagcccatacattttcaaaaatcaggttgttggtccatactctgaaagcttcagctttggacgtactactctcctcatcaggacgaccaaattcgctcaatcaccttctgttttatctgcatggaagtcgaggaacatgtcatgattgtcaagcacttcccacacgaacttcacgagcgaaagtttacctttatgacccttgcaattagcagcgtcgactctgaaaccgcagattgatctgcggcgtctgcgagagcggcgagcggcaacaacgccggatgtcgccttattcaaacaacggagcgatccgcgctcataatttgcgcggtttcgctaagtggtttactttgttacaattttaatgtcggtcaggttcaccggttgtcgtccgccggttcggcgcttgtgtcttgtcttgtcttgtccgcctcccaccctcggtcgtcggtcgtcagtcgtcgctcgtcggtctgcgcatgcccataccgtcctgattacactctaaatcatttcgatcctatttttatctggatctgtgtcaggcgcgacatctgcatctcaaacgccgcggtccagccgagtgtcctcctcctctttgcgtgacccagttctccccaccggaaaccgacgacctcccacaatttttactccttttcggtttcgggagtcgctccaagccaaaaattcaaaaatcttggtggactttggtttttcttttcctagacgaattttcgcgtcagtccgatcaattcgtctggaatcagatggttttgtttcggcgccatcagtgggcgacattcagacctatcaatcagcacggaccaatcgcagagcttcccgccagattcacaaagtccctggcatttctagtgggtaaaggttggatcccaatggtgaccccggtgagcaccaaccacccgtttggtgagccccgaaaaagagcatggagttcacaagaaaatgcggattcattggattggatttagactggattccaatccaacgcgaaaatacgccccggaggtgttcatcaggatttcaacttctaataagacctgaagagaatctggaaaactcatgaaatgtattaagcagaaatgaaccaattcacattagccattgcaaaattccatcggacggttgtgcggaatctcttgaaaattttaggaaattcgctcacgttacagagggaatctcctgaatctttccaaggaatctacactaccgttctcctgtaaaaaataaatcatccaatgaaatctggcattgagtgacgtgacttggttcttttctgcttcatagggttcagtcaggagatcctccgaaaactgaagaatagaactctatttattttatcactcatgacctttctcatcaaaatcctccgcactttaggcactcttggaccaatttaattttgctactatgctgttcctctttagcacagcattgtagctcacatgttcgtacaatgtgtttgcagcttctataacgattccatgccctcagcgacacctaaccgcctctggcagcgatttttccagagttcttccggaaaatcgcacctctttattccctgttggatgtaccatcaatccacaattttgtaaggcatcctcaacgttttctgctagagagagacccagtttagaactgttttaaaccttttattcggcatctcttatacctaacaaaccgagacaagctttttgttaaaaaggaattcactacagtttttttgttgcccgtaatgtcacctaccgtcgtttatatgccttttttgaaaccgctcaaaacagacaaacttcttttgttgatattcgtcgaaataccaatgggatgtccatattatccgtacaagtcaaggactcgaatcaaagtgcagaagtaagctttcgtaaggcgaacttttctagaagcagaagcgcttggagaggcgctcggagtgatgtggtgggggaagcaaggaacgcgccgtttcgaattccgtcgacctgagaatggaagcgttatttactcaccagcacggtgatgcgcgtttaatccagcttttaattattcttttgtttttatgggtttatggctctcgtattcacccgcgaacactcaagctggacgctcgcgcctcgagattttcagcacaacgtatgagttccgacaccgaggaggatgagttgcgttgctccgtgccaccgccgcgcctcttcatggagtccctcgagtttgttcaccgacagctgcaaggaaaactcagctaaaatactaatcgagaaaatgcagtcgaagagtggaaattcaaaaccctacctgagctccatcataggtgctacactggaaaaaaaaacacattggatctagagtccagactcttgaaaatattgacaagaaaaaggactcttgattttatcagatttaagcttaaatcaaaagaaaatccgatcaaattctaggcttagttcttgatttaagcttaaatctgattgaatcaagagtattttttcttgtcgatgtttttaagagtctggactctagatccaatgtgttttttccagtgtagtgatatctcgcaagtgcctccaagcttgaatgggaataggtgaggcatatatgtagtaatgcgtatcctcaataagaaacttaagacttagagaacattttcaattgaaaagttctagatgcttgggcattttattttccttacaacaaaagcataatccaagcaaccccttttatcgctcgaaaggttttgatttttcttcagttgatggcctcatccttcgatttggtcagtttttactcaggaaaaatcaggaatcatccagaagaaaggacgtaactcaattttaacattttgaaaaatccactctcgacttgatgttttaccagggaaccatcaggcatctctaattcaaaattttaccaatttttctttcgattttacgtcaaaatcagaaaattttgaacagaaactgcgcagtcatatttttgcacaagattaagttaatttttcaatctcgaaatggagttctgttctttcgacttgacaacgacgatttaccctatttttggcaacttttgcttccttccgtattttgaatttccacaatttgtctcctctttttccactccggtttttttttcttgtgtggaaaattacgcacaatcctagcagcagctgatggctcttatgttgtttcgaatttcctttctcgatgacgaggttcgttcgaagcagtgcccgggatttgcgaagtgccaccgttggtaattggattgcaatagttcaaggcagcgacgatctctcctggctcgacctctacccagcgttgtcagatcggaacgagtacagtggcgattcttgaaagttgacaacactgtttttctccatttaaattagtattgaccgtattatgatgcctatggagttccttcaagtaagttaacgagcagatcgcttgttcgccgaaaaacttggtctcgatctgctaaactcggacgataactctctcggtttgtagatttgccttcatcgccaagaacccgtcaaaaatgtgtcccttctaggaaaactcggggatttcgttgaaatttggtccaaacgaaacttggaaaagaaaaaatgattgaaaaagcattgattccgttttattttctgaagtatagtgacatccaataatgattcaaatgatatgcctcaaaaaatatgaagggatttactaacgtttttttttttcaacccaggaacttcaaaatataagcatttttcaatggtaaaaaatttaaattttgcaacgttatattaccagaacgagctttgaacacaagtcaaaactttcattggaggattgtcttaccttaaggtttctttccgattacgttagaacataaatcccccccccccagcgacattttcttttcttcatgagcaggaacaggctgaatttgttaagcacctgaacgggccatgccaataatttgctcctcatttttccccgatgataatgtaatgcatttcgcgaagtgcgatttgtgcatgatgtcttctctgtgaatttatcgagagaggattcagaagactggggcgaaagatgcatttgtcattcggtcttgctccatgaatcgttccaatttaagtcgtgttgagacaactttaaaagccaaggttggcgcctgtgatctccccttttccacggcttcttcttcgtttgacaaagtgggatgcacgatcctccgttctcctgcatatgtcaacgttcaggagcgcttgacgaatggctcggtttcacgtgtcgagaatcgtgttctgatcttaatttgcaaaaaatgaaacgtatgtgtagggatgcttccttttaagtctcttttcggaaaactctgtggatgacttcatccagcgaagtcgtggatactataccattgtttcattcggttgattgagactctttaccggccttttggtgacagatgggaacttttactttcagggactcaacacttccttctggataattacaaagaagcaacaatcgtccctttttcagactgtcgaactacctactaggtggatgatgagctccgggtgacgaaatgagccaaactagtttgccaaacttcgatacgtttgcaaaacgaaatacccaacacagggcggcaaaatttcatgaagaattaaatctcaaaatttcacgcaaaatattccatgaactttcagaaatgtatgaaagatattgaaaaataccggttctttttcgtgtttcgcaaaatgtaaaaattgtgactttcctctatgtttgagtatttgagtgtggattgcatatactccagcccctgaataatatgaagtatctctcagccttgtgaaatttcatgaaaaatgtccctgctctttcctatgtttcatttctttcttacgtttcatgccaccctgacccaacacgttgttcaacatccacccatagtaggtaagtcaacagttgagtgtttaagtaccggaagtaaaagctcccaccgatgccaatttaagatagcaatggagggtctttttgtctctggttccatccctcgtagattttattaagtctcgtgcatagatttacaatgtttcctccaagctcatcgctgctaaaaaagggtccttgcggccctaaaagttgctcacgattttatagtttctttttgagattgtttgaaagtcaatgttgacgccttctacctccctttctcacgaattattcttaaataaacccagaatccacagtcctccattacctcccactatatcggatgacaaattggtcaattttacacgcaaccaaactaaaaatttcaatatttttcaacacgccccacactgcgtaactgcgcccactgaaacgggactattttgaatagagcctgaggacaaggttcggaaactctatatcaaactatcggcaaaaggaatcggtcgattttaaaacctgacatgccaattttcttacgatccctgaattataagccttcttatgactttggaggtcaccaggaaatagacatattgggtcttgacgtcagtcgattcatcatcggcccgcatcccggctgcgagggctgagctttcaccgaaactcacgccctctcgatcgaggtaggccacgcagtcgtgccaaggcaaaacgccgtatgaaccctcagacgttgccaaatggctttcgataaagtatagattttttgaaaattttgtaaatttgtaagtaaaaacttttatgaggaaaagcctctgaagtatgtgacgctttttggaagagagggtctttcggatgcgttaaaagaggaggaagaggggtccagaatcttgttacgtgacgctttttcgagggggtattttcttcatttttcttatttttccattttattttatttaatttcttgtttgttctcatttgtgtgattcatctcccgttctctttaaatttgttcatgaaaaaatgttcggaccacttatttttccttcattttcggctattatattttttgaggggaggtcaaaggtaacgtcacttatttttcagaggggataaatacctgcgttctggaagaggagagagaaaaaattatattctcagcgttttgtattgtataaacagccctaaagaggtagtattcacaacctaatcaatgatacgtgaaaatttcaaggaaaatattcacaacttttcttcgaaatgataacagtcgcatcctatcatatggttttccgaaaaaacaactttccggaaacaaagtccatttccaaagtcctggtcaggtgtttctctcgatatcattttccggaaacaactctcttctttcaattccccttcgaaaacgctggatcgaggtacaacagtatttaattggggagacatttagcaacacccaaacgttgatacggcgttttcgggcccgaatttcgcggcggcggcgacggcgctcccgatctcgatcaataggttattaatcaacaatagaggcattaattcgggcggaatcccccgacccgggcccgggccctggccccaaggagattttgcacttaatttttgtcaaggccccgtcggcgtcgggcaccgggccacacagcttaggcgcggagctttcgtcgtgagtcgcgccgcttgcgtcatttcccagtttgctccttttaagtactcgcttaacctccactttccgccctccgcctcggtccgccgatattcggccaatgagagcgacgattctccatgctcaagcttaaacaatcaaggtggttgctcagctgaggaagaacgccgtatgaaactccaaatgttgccaaatttccccgagtaaaatgttaacatacttctcggcaaccggaaaaacttgcaaaatacccgaactaacctaaaaaagacgtgtaattttggtacgttatagtacaaactgttgaatattttaagtcctggccgtgtaaatgattttattgctgaattcaacctttacttttccatttctaacgcaagaacaaccacgaaaaaacacggggaattttgaaccttgaatgcatccataaaccctgacgcctgacatccacttattaggaaattgtgcatttttatcgaaatgtccacgtaggtagatcaaattgaattgtgcaaaaaaaatttctctgaaaaattcgaaggccatattaataattttactggcttgtactttctaaatcatttatctcgtttcctgtttagaaaattatctcgttggtcatgatatttctctttcctgagtttcattgtgttcgtcacttcataggttgtaatgtaatgggcctgttgcatgcaagagatacagccgtgcgaatagactttatagaggttaaatgacacgaaaattacgatggtcacattaaaaaagtctgaaatacactccttaatgcgcaatttgtgttgttaggaacgcgctttttcaaatttcccgcgtctgggggcagttttctaatggaaacaattaacggcaactcgcggctatttccggtcaactaaaactgacaacataacctaaaaatcggagctcgtgacatcgtgaaatgaaatgtagaaggattgcgttggatacttaaaagttgatcgatttggttaccgcataaagcgtttatggaccactgtaagagatcacgttgggtttgtaaacaaactgaaggaaaaaataacaacaacaacaacgactcggcatcttccggaaatcaccgagcccgccgtttgctcgtttccggtgattagaaaactgcccccagacgcgggatatttgaaaaagcgcgttcctaacaacgcaaattgcgcagtaaggagtgtatttcagacttttttaatgtgaccatcgtaatttccgtgtcatttaacctcttaaaagtctattcgcacggctgtatctcttgcatgcaacaggcccattgaagtaatataaagcatgtatacttacaagcgaattacacacgacggcaatgctcggcaactcgagtgcgcaaaagagatgaataataacttctagatgcaactattcgagctctacggatgtccgtgttgcatacgcgaaatattgaaggcgttttagattctttctcccgcgcggtaacgcttgcgtttatcggcctccacgcacttatctgtgttgccgtcttcttagttcctcatttcttcatcgatatggtttatatttggattaaagaagatatagagacacttccaacggaaaaacagaagccggacttgactagttttgaataatttacaactacattcattcaaataatctctcgcgagtccccctgaaacaatcggaaaatttggtcgaattctactttactaacaaattttaaaattgtgatggatctgctggaaaatttggtgaattaactacaagctcctcgccccaagaatcaggacggatatcgaacaatactcccattcgcaacttcccccgttctcattgcgacctctccgtcaattcgagcttgcgttctaagagtcctcaatcatccaaagccgcgtatagttgctagtaagcaactataagtaactagtaagcactagtagtagtagttgctagtaagtaacttgtcaaataatgaaaagatgtagataaatccacgacccttcgtgagtgaaacaggaatgagtcgagcggtattttttcatagtcgatcgtttaagtcccctagcatacgactcactcgtgttgaacaagctacgatggatctacgttttgagcgactgaatttcagagttatagaatcactctatggtgcattcaattgaaaatcagttggcgattcatatcacaaggggaagggagtatttccgaatcataagtttttgatgtccatttggacttcacattttgcaattaggaactaagattccaggctcattttaaaaacagtgtatgtgctttcaatgtttttattggaacaggtggcacttttctctcttctttttcatcttctccttttttattctttttttatcagcctcgtcttcctctcctttcttttctcgcttttcctcatctccctccctcttttctctttttcccacatcgttgtccttttttcctcttcctctatttcttattatttcccctcctcgttctctcccttctcgtttctctccttcttcttcttgtttcgttctcatttttatttttcttccttttctcctttttccattttcatcgcctctctttttcctttttcttttttattatctccttctttctcctccttgtcggttattttttctgctctctctttgtgcgttctctttttttcctctctctccatgtttccctcttatttctcgtctccttatccctctcctttttttctcctccccttcaccgcgattttccctccgcagttagtagttcctcgcaattgcctcccctctcgtagatgaactagaaattggattgcactttgcaaaaaggaaccagaaacattgcaatgatgctaagattgtgcattttcatcctttgcaataaaattactgaatcatgaaaaaatatgaaatttacgtggtaatttttgtcttaaaacaacttttagcgagtaagatagaaactgtccatggataatctggtttttcttccacactggaaaaaaaagaagaaaaaaatacattggatctacagtccagactcttaagaacatcgacaagaaaaagtactcttcattcaatcggatttttgcttaaatcaataaccaaacctcttattttgagcggatttccttttgatttaagcttgaatctgattgaatcaagagtactttttcttgtcgatgtttttaagagtctggactctagatcaaatgtatttttttttccagtgcaagacaaaagaagttgcacaatctttgcaacattgtaatgctcctggttcctttttacaaacttcaatccaattgtaatccttaattgcaaaatgaagatcatttaaccctagctaatatgagatgtggtgcgacgcgtgctgatccgggaagagcatgggaggattatgatgttggaagttaggacgttgacagcgatggagcggtcctgtcttgggcccggtcgtagcctgcaggtcgtccatcatttgtgacgcgctccgacgacgtgacgtgcgttcttcatatgggggcgccgtcgctgagccgcgctcgctgatcccattggttgcagccgtgggaggtgtataacgcgttcccctgttgatagcccctattttcccatagagtacctgtatagcgagagtatagacagatgtgaaactccgaaaatccatcaggccttcaccgacgcctccgcgaataaagttagggctcaaaaatgcagccaacctatgaatttcaattatccagagcgatttattaatacaactgttacgaaccatcgtttataaagcacgtatttgacttagtttttgcataaatttactcatttttgtggaaggacgctcatttatgtactttcttagccatcttcgttagaattggaatctacagactggcagtgaaattttgtgcgttagaagttggttagaagggtggctgcacttttgggccctaagccctccatgaagcgatctgtccatactctcgctatacaggtactctattttcccataacggtcacgttgagtagcgctcaccccaccaacatccccatgatgtagaaaactgatcatcggaatggatcagcaagttgattaatgaaattgataggcaaagctacactggaagaaaacacattggatctaatgtccagactcttgaaaacgttgacaagaaaaaagactcttgattcaatcagatttaagcttaaattaaaaggaaatccgctcaaattaagaggcctggttcttgatttaagcttaagtctgattgaatcaagagtattttttcttgtcaatgtttttaagagtctggactctagatccaatgtgttcttttccagtgtatagacaaaaaagacaacgggaaatagagcgatccgtaagcgaaacctggtacactaaagagaggaatgatggattaactatgtggtctcgtgggttgtcgttggttagtctattactgacatccgttgtccattgcaaccatactcgcttgcaccaataagattcctttcctttgtctatagcttcgtccatcgaaatcaatgatcagccggccggttgaaattgatagacaaagctgtagaccaagaagacaaaagggatatggagggatccagttggtggaagcaggtggttgcaatggaaaaggaggtaggtaatagactaactaacagcaacccacgagagaacctttagttagtccttcatttatccccttagtctgtaagaatcacccatatcaaccaataggatagctcgataccctatataaatcttctttggctatcgctttgtctatcactttcaacaatcaacccgctagagttgcactagtcacggaatcgtgttttaatactatctagatcagcaaaaagaacaagatctgttcactcagcaatgccaaagtttctacgtccaatatttacggagatataactcatcaaaaaatacgatatgtattacgtcatccgcaccggctagtgtataccatggttcatcttacatatctcatccgcacagattcaatattttttttatattttgtggaaaataatcggaaagtatcaaacttttaaagtgtgaaaaaattacagaaaaacttgataaaatacccgcttgtcagcctcgtgtgcggtgacattctatcccgatcggtgtctaaaagctcgtcgtaaaagcgctatcgttttcgtcctctcttccttatttacaccgtgcaaaaagtggcactattagcttattttgtctcagtttacgtggtcgtttacgatcaaatatttttgatggacttatgacgaggttccttttttcaagtaaacacgtcggcaaaaaactgctttgcaaataaattcgtttctaactgagactggaattttaagaaaacaaattgaagttgaagtatcggttttcgcaacctacatgaatggctcttatcttttttcggaccatcatcgtttatgagcattagaatgtggtccaaactcattcactaccgctcgtgcctttgtatctgatggtgagcgtttctttaaatatctgagttcattttttctggtattgtgtattttgtttgcttttgtttctgtgtattcatccatatttttattctgttacaggtaagttatgaaatttctaaggctctctcattcttgattttctcagctcgttggtaatacgccctaattttttattagtttctcaaaatataggtagatacgtatattgcgcaaaaggggacttccgactctttcggattttcgggcggggtaaaaataaagaagttcattcatgtatctgcatgtcttgtttgaaaaagacccataccttcatagagtcaattgcagatcagctcgaacttggctcctctttctaaatgtagttgacctccccttgcaaagtaaattttaatacctcccatggacctattcccaaagttttgccgtagaattttaccggaggttcttgagactgtctttttgatgctgagtcaaagacaccattgaacctgtcataaacaacctctcccaaaggaatgagccgattaaggatcgaattttatcatgaccctaaaaaaaagcaacctgatcgacaggtatcgattgttttacctgaatgtaaatgaacgaaaccaatgttacgaaacggaatcgatttacaaagttctcctgcgcgaaatgttcgaatcgtgaatgggaggcctttacggtgctcctactacattttcgtattctaatgcacgtcaatgaatttaaatcgtcacttttaaggctcggaacgagaaagctcaaccgatgaattgctggtggatttcgcccgaagcaaaacaccgcccggtggcgtggcggtgcggtgcggtggctggctaccacgcgtcgctttcagcgccgaaacaggttgaatgtcgaattcgaatcccattatgcagatagtctcagacggactaatagttacacctagtaatccaattctatcgcgagcttcctctacattcctctctgatgtttattccgcctttatttttattgcgtcatcatttcccctcatttttttcaatctattattatccaagcatacatcaacgtctttcgaacatgtattcagttcacttttcatcgaccgatgtatcactgatcaactttttttctttttcttgtttcgcttttttttatcgcaaaccttcgaagtttaaacatccagcggtgcctagcaattaatcattcggatacgcggggaaaaagaatggattatattgcttctttgtctcttaatattgactagttgggatctttgtgactgaaaggattgaatgaaaatattggaagatttgaggtatcgacaattcgaaacaagactcgtttaatgatggtttttttttttttttttttttttttttttttttttacattaagacctttcgtagaactgacgaacaactggacgatgtaaacctattgccaggcagcgcccacgtaagattctccttcaatttagccgaataggcaaaaacctaccgcggagttcgaatagttgcatgttcgaaaaactcacattcacctcgttttaagaactttgattgaaccgacaaacgctgcaacgttgtaaacctagtgacaggcagcgttcacgcgagttcctccttcaatttttccgcataggcaacgaacccaccgcagaattcgactagttgtatgtctgaaaaacacacaattttatttctccgttagctcagattaaaccgataaacgatgcagtgaaccattgggtaaatatcgtcctcaatgttgtgccttacttacattttctctggcagcatacgtcttttttgaaattcgattctgaatactacatgggtaagaatgtatctttcaaactagcaaaatcgcaatctgaaaaatatccttttgcataaattacgaatttcgtcggtagtttttgccgactcaactttattcgatgtgtatggatggatgtattttgttgaactagtcggcccaatcgtggtagcaagtactgtgaatttcattttggaaaacccgaggtaatgattattttcgagcagggccggattaagggggctgccacacgggccggcaaaggaaggcggcaaagtttgcaatttttttaaatgtaggtataaaaataatcggattcagaaaaaaaattatcaatgagaaaaggggacgaagtctctctttcctgagagtatagttatttctaattttatcgtttttcggtgatacaagagacagcatctttaattagtcgagttaagagaggaactaaacacgcaatttggcctggagctcagctaagaggacttgagatgaataagacaagccctcggcactgcggtcacacatggaacacatattagcgcctacaagactgcgtgaatacttcacccattgcgtcaaacacagtgcgccgcgccggtcagaagcattcggcgtgaaacgcgtagcgcctacaaatctgcaggaatacttcacgcattgcgccaaacacagtgcgatcagcccggcgcagtagcgaaggttatatcattaaaccacatgtatgtgtgttctttcaattttttggttcatttcttatgaatggaggaccttgtttacacagagatatgttcacggaacttaactttcgcgcaaagttccgtgaaattttgctagtagtgttgacagggctttcgcaaaaaatgtactcaacacgagtaggtagacacgtcttatgcacccctccccctccggcacgttcttttaatgatttttattgatgtttcaaaacgaatgagaagggggcggcaaaaaacaggcggcccatgagcggcaagtaggtaaatccggccctgttttcgagttggtaaaatgcagtcattaaaatttaagaatatgaaaagaataaactgctaacctcagaaaatgagagaacgtgtgcatttttttcttggtaaacaaaagaatataaactgctcctttacttgaaactgtactgtatatattgagactctaattttttaaaatttttgtcggtcccctcaccgtgtccccatttaactttaaagtgttcatcaaatctatacttacgaggtgcctagaccaatcacgtaccaggtagagcgattggattacattttgcagtaaggaaccactatctctggctcttccatttaagcacctttctgcatagggataccaatagcatttattttgtttctaaaataagccagatatagtggttccttattgcaaaatgtggtccaatttaaaaatgcggccctgcaagtcacctaatttttatcagtccggttcaatgtaataaatccatcacacgaatcgaacgttcagttcgacgaatcagaagttcgggctaacaaaccgaatgcatcgatcgatatagatcaccgaactcagctttcgtgatcggacttttcaacatttaacagtaagtgcgtgcgaactgtctctcaacgttgcaacagggaatacatcgaagtcagcggagataggttgtttttgcgcctgatttacaagcgccgacgaatgccaacaagtctctttaacatgacgaacgagcacgcgctcctttcacccaatatcccaccccctccatatctttcggccagtggcgtggcgtgctttgcaatatatcgattgatctaccatttaaacctataggaaaggatcgaaaaacagagagttcacaacgaacgtcttaataatcgattctttaccacagcttcaaatgggggactatcgataataatcgatcattcacgccccgccactgcttccggcgtgtccccagccgcaccctcctatatagctcaaacctgcggcggcacaaggaataaacctactacagcacgtatcagagtagcgtgctttacaaacgacaggtcgtgagaattttattaataaatcactttggttaatttgaattgataggctcattgcctttttgttccccaaaaacttcatgacctaacctcaaaattaccgaaaagtccgccctctctctatacaagtactccaatctttagtgtgtctccttttactcaaacacggagaaaaaaacctcgtgcgtgggacccgaagtttaggtcatatggatctctgaagttttcagattgagcatccgaacacttaaggtctagctgtcgtggttcggatcacacatctgaaacttcagttctcacatctgaagtgcttcagatgtgagaaccgaagtttttcggatgtgagaaccaaagttcttcggatgtgaaaaccgaagtacttcagacgtaagaactgaaattttagatgtgtgatccaaacctcagcagctggacattaagtgttcgaatgctcaatccgataacttcagagatccctatgacctaaacttcgggtcccacgcacgaagtttttttctccgtgatgaacactgcaataaatataattttttttttttttactgttagtttactggctataaatattatttaaccgcagcatcctcgagaaatctaggacgaggaacgttttgcagatgttccgaagtagtcgtcgatgcgttactgcagtagtggtgcatcctatgataaggcttaagatgaaggtagtaggccctgttcggggagtgcgaaggccagcgatggaaatgaccgcggctacgggtcctgcatcagtcaacaacaagataaatgggatcttgagggctttgcgctaatgatgatgacggtgtgctctgtgcttgagcgacaagtgtcgcccagccgagcagccagggcagcgcatcacctgctcgcactacacttcagcatccactcctctagtttctagccaggagccactcctccatgaatactcgtcaaggcaatcgcgaggctgcccaagtttacgaatttgctttatcgatgcttcaataagttggaaaataaccaggctttcaactaaccataaaaaaacccaatacaagacaatctttatcatctcataaaacctcattactatccctttatctcctacagaatactaacataaatccctagacctattatgataacctacccttaccctttcatcccagctttaatcaaaacctagatttctttccaatttcagatcccttccaaggccgcagtatccttcggatataaagcctaaaacaacatacaaaaacaaaataaataagttggaaaatgtgttggtacgtcgattgcaacgtttcaacttcttcgatgtttatttttggggagaaaactcaacagtaatttcttcttgaggtttcttgcgaatttcgatgaatgagtggaggaaatttgcgggaaacttcaagaaaaactgcttgtcgactctcttttgacgaagtggaacgagttctgaaatttgcatcgtcacaacttggagatacttattttccaatttgaaccatcgatgtatgatactccctgaaaaagatttattggtgttaaacaattcaaaatcatgggcgaatttgggggagcctccccctcctcaccccctcaaccactcctctatgaatactcgtcaaggcaatcgcgaggctgcccaagtttacgaatttgcttcatcaacggttcaataagttggaaaatgtgttggtacatctattgcaacgtttcaaattttccgatgttttattttttggggggaaaaaactcaaccgaagtttcttcttgaagtctctggcgaatttcgatgaatgagtggaggaagttcgcgggaaacttcaagaaaaactgcttttaaaataagttacgaatttgctttattaatggttcaataagttggaaaatgtgttggtacgtcgattgcaacgtttcaaattttccgatattttatttttttggtagaaaaaactcaaccgaaatttcttcttgaagtttcttgcgaatttcaatgaatgagtggaggaaacttcaagaaaaactgctcgtcgactcccttctgaagaagtggaacaagttctgaaatttgcatcgtcacaacttggagatacttattttccgatttgagccatcgatgtatgatactccctgaaaaagattcattggtgttaaaaaaaaattcaaaatcatgagcggatttgggggagggggcgtaaggggcgagtgcctccccctccttacccctgttgccccaaaaaaggaggaagacgaagggaacaaagttctagacgtgattttggaagtgatagacatttttttaaagatcaacttctgaattgagttcggatcgatctttaatggatatttttgccgaaaatcaacctttgagtgtgatttttattcatttctcagccgataatacgtattcctctgagtcgggtttgtttacattgggccaattttggagctccatgatatcctaaaactgacgaatcaatcagagagcggcacagagatggcaatactctcccgtgtacaggtactctactaccttccacatccattgcaaccacccccttcccccaataggaaccatccataccctttggtcttctttgtctatcgatttgcctatcgatttcaacaatcagcccgctggacttgacctacgctagagcagagaatcggggtcgattttcgaggcagtggcagtcggtcggggtcacgggacgaggtggatgcaagaggcaagaggcgaggccctggctcgactagaacatctcatcgattgggaggatttgaggttacgaccggcgggcgctaatgttctgttgtcgcggcgttgtcggcggcaatgaattacgcccgactgacagatgcaaccggctgcaactgcgatgtgactcttaactgctgttaatcagccgctcggcgtcttcggcctggcgttaatgagccgatcccattgttctgccgcggccgcccgcctctggacccccgctgcaccggcttgtaaacttgtaatccgtacccgagttcccgagtccgatgccgttttcccgagtcgttgcgcttgcgcaggccgctcgcgtttgatgccttaatccagttcggcccttgcccttgcacgcctcctgactcgctaatcacgcgccaaggcttcgagccggaccatcctagcttttccagccggagacaaagagaggccctccgctggtatcttgtcaatggtaggagcttttactttcgggacagcaacattcaactgttgacctaccttattgatggctgttgagcgacgtggcgagtgattcgtttcgcaaaaaagccgatgtttgatcgacgtgtttagtgcactgcaacgccagagggtcatcagctgacaataaggtagtcagccaacacaggtgacctatgactgttactgacttaatttcttgtctatgaagtaatgttgatccccgagggtagaagtttgcacctgtcgccaagaggtcagtgaagagtctctctttgtctcggttctggagaatcaactctttccgaagatatttaatgattcttggcgcttgaattgaatccacccgctcatgaaaactgaatgctctacgtgattctgattcacatcgcgcactaaacgttatcatggacgtctctgcgataaaaaaatctggtaacctcaatcttgacgctttggctcagctatagcaaattatttatagtttgaaaaacgcattgtgtgaaatgaacattactcgattgagaagatttctgaaaccgttgtagtgcgcgatttgactcacgtagagctctgagtttctttttagcgggaagttcaaattccttgtgaccaatgtgaaatacaaatgtgaatatctccattaggagttggtctcagtaattttcgttgcgcgaatcgtgctctacgtgaaattctggttaagaaacatgtatcagaatgtttaaattcgtaccttgtctaggggtccattccttacagggggggggggctcaaaaattccggaaaagtgcgttgcgtgattgagggacggccctttggtgggagtacgtggaagccgattataaggggttgttgccgactcctgatgtttatcatctactccacctgttaccaactttgttattgtagaagttcaagattaattttgactataagtgacttttttcgattacttaaaccccgtttaatcttcggatccgtttttacaccgccctacttcatgagttgttatatacttgaagaaagttcattttccccgacttcatttcatcgaaaaaggaagcaagcaaaggctgctaccagtcaaggcgatcgtaaaaatatttctgagacgaacagtcaatgatcattttaataactggattccgcagcagcttaacgtcatattaccaatcaaacggtgcaattatcggattccgaatagctcacgacatagtgtcgcagttcccacgccacaatcacgccttcttcgttcttgcaaacgttttaatccgccgcctttttcttacaggcgtcagctctcattgatccaaatttttgcacatcgaaagatcatgcctcccgggcactgttaaagtgtactccgtaaaaattgtagattcctctccgcactcatatactcagtttaatcaacacgaatgagtcataatgccgggagacttaaacgaccgaccaagaaaaaaaaccgcttgacttattcatcttttgctcacggaggatcgtggatttatctttatcttttcattatttgacaagttgtaagcaactacactcggttttggacttttaaaatataaacttgaactgacagagaggtcgtaagcactgaaattaagcaagatttaagatgatggattttctgtctcgctctaaaagtgcgtgaattttggcgtggacgggtgctacacctgttcacaatggtttgtactatgaacatggctgaacaaatcaaggtagaataaacaagtttacgcgtggatcagagccgaataaagaccttgcggaactatcccattggtggaagaaactttaatattctagagattcaacatttcttcatgcctgcgacagtcatggcatcttggcatcttcttgttggttcttgatctgcgtgtcaagcgctgtgttgaataaaatttactaattggctacactttcactaagcagatcgctgaacttgttgctaagcagccatcaaggaggtaatttcaagggccaagggttggagcattgaaccaagtttaagtttttacctgaagctattctgatctcagtttagctctgacctagaggcgatggttatcattttgtgtttcgaaaaatgatatcctcgcttttattaatagacgtagaaatttctctatcgacgaatcagatcttatcatacttcgctctgctacaaccatcaaaatcatattctgagacagcgtaaccttgacccattcactaatttgttgttgtttaaatatttcgagtttagcttgttctatagcttggttgtcggggtattgttgtcctcgtagcaagatcatcctcgtgtgagtaggagcacggtaaacgttgccatttttttcagaatttatcgtggtttagctacgaaaagaacgcaagtccgttctttaatgagccctaagaaccaatgggaaatgtgtacaatagggctaatctcataatataatcaagcccttgtgccaactttgcaacgaatcatccaatttttgacgagagggaatgggaattatatgaattttacctttctactggcaacaatgagctgcatgtcgcgcgaacaatgtctgcctactagtccaacctcgtgcctatgcctcctaccttaactaccgtcgcacttactcgccagatcaatattagctcctcaaacattccaccgcaaacaccaaacatcccaagctgacgcgatttcattgctcctttgaacaagagattggaagacttgagactgttcatcatcgggatagcgttgtaattttaccccattttttgcactacactggaaaaaaaacacattggatctagagtccagactctggaaaacattgacaagaaaaaatgctcttgattcaatcggatttttgcatgaatcaaaacgaaatccgctcaaattaagaggcttggttcttgatttaaataaaaatccgattgaatcaagagtattttttcttgtcgatgtttttaagagtctggactctagatccaatgtgtttttttttccggtgtagagtttttgaacggatacgagcttattaccataattctattgaaagattattcggataaaatagctgtgcccacattttaaaataatgcttcgataaaggttgaatactctttagagcgtgtggtaaaattacggaaataagcgggactttaagtatttccacgtaacttcagcatttttcatggatgagcctatgcaacgggaaaaaatctcaaaataatgtaatttaatctctcttcaaaatataaaaatctacaggcggattaaattttttacagaacgcgatggaaaatgacgaacaggagagtcaactcaacctgtttcccatagctcaacttaaaggagttcatctaggttgctactcgatttggtgccattaggttcattcatgcaagtaattctaccagcaagtaactgacaaagtataggtgtagctgactgattattttataaaccacaatgaacgacaaacagtttattatccggggagcagtgaagtttaattgaagtgaggaaaggggttgtttgtcactccataatttgacctaaaattaaagctatgaagtgcttatcaggtgctaggatctagtgctttaccttatcacaaataagagagtcacgcaaatattttttcttaaagtaattgacttgttctttttatgagaagctcttggcattatcgcctatagccatagttgtatctctaattgaacgttgtcgtgaacgctatacagcgttaggttgtcggctttttttcagttttttcctcttaggtgtctcgaagtacttcacaatcagcttcacctcctttgttccgtattgacatgaactaattgtaagaagttttagagttcataggatttctctaataattaattatccccagacacgtttagcaggtgctcgttggcagatatgtaggatgaagttttaattgaggacaaatagtcggataattttatggcccaatttaaaacaaataaccaaaagcagtctttatccgccagagaatcaacgcaagtcgcctagctgaactctcaattgccgtcattcaatctcgccgcctcggtttcttctgttgctcagcgcatgttgtctgaaatcgggccgttgcacgttttgatgaagcattctcacgatgtaattggctctccgcgtgtactttgtcatcggctcgactcatctcagaaccaatcaaattcgtttcttcgtcacttgaaattacgataaacttgtcataattaagtatttaagcactggggaaaaaacacatgggatctatagtccagactcttgaaaacattgacaagaaaacaatactcttgattcaatcggatttttgcttaaatcaagaaccaagcctcttaatttgagcggatttccttttgatctaagcgaacatcttattgaatcaagagtattttttctcgtcaatgttttcaagagtctggactctagatccaatgtgttttttttccagtgaggtgttaaccccggatacactgaagcagtcatagaatacttaaaattttgagcggaaattgagggatagtgcactgcattggcggatccagcaaatcggcaacgtcgtttttctccatctaaaccttcggaaatgtatcgattcttggagaggccatgtgggtcgacaagaatcgattatttaacacagggttaaatggaaggaattcggtgttgccaaattgctggatccgcctgtctttttcctcgtgcgggatcacacgcgtagcgtggtgttatttctgccgtgctgaagaaaaacgccgtatgaacacccgaatgataccaaatttcgccagttaacaaaaatatattttggaagaaaggtacaagcattttcctttgaaattttcagaactttaagataaaatgcgaacaaaatcggaagaatgatatttacaactttcccaagaaatttgtactttatcaaaggaaatttgacgacggcacggcagtattaggccgagccacggttagtttcaaattacttttgacttttggggaatcgtgagagattcgcaaaccttgaacccaatcaagaataagagagcgctcgttctcggttcctcgatggcccaacaccagtaaccggagagccgcaaaattatttttatcgctatcgtctatcaggctcccgccctgtgattcaatccattcatctcaccagttgtactctaatcactcgaatacttattactctcagagatatagatttggatcatttaaacttacattgttgataagtcacagagaattagcaagtaatgccaatttacgagcggtttgtcggttacttgccgaggcaaatcgcgagccgggcaattgattttgcattactgccgtgttaaggaaaaacgccgtatgaacattcgagtgttgcaaaatttccctcgagaaaatgttaacttttgaggaacgttacgaatatttttccttgaaattttcggacgcttcagatcaaataccaaacaacataatctacgaatttggaggaaaaatatccgcaaattttcttgaaaattagtgcttcgtaaaaggaaatttggcaacgcctggcggctcatacggtgtttttcctcagcacggcagcgtacacttattactcatacaatttgcgagctgctaatgacaaatggaaattatatcatacgggaatgacagaacacggagctataggtatttctatcaattactctgcattacgtttcctggggtgtaatattatctggtgcacacgcattcgctcacgcatgagcactcgatttcacttaatttacagtttttgatgtagagtgactcaataatgacgaggatcatcattctatgtacttattataagtaattagtgcaccgtggaaggttttagtggtactgcaaagatgaaagagcacgatccagagcgccttcatttttgagtgatactccacggtttaccggagagttagtttagttgcctatctgatctaaacccaaccaagcgcatttatgtgaagatctggaatattttttttctcgcaatagttttcgagttttcgtcttgcgacgtagtcagttcagattcccaacattcaactcgaattgaaataaagtaatcagtacatacttcatgtttcctcattcaggaatgttagttttttatttgtcgcaagcgccttactcgcaacttacgaactgctgactattctcaacatttgtctgcctattgtttgcaacagataaaataagttgtatttgcgccttttgcgcagtgtcgaaatcatgtctaaataattaaatcaattaaaaatatttccccgctaagtttttccaaaactttaattcttatattcgctgatactaccttatacttgtaaacaagttagcaattttgaagctgcattttaacaaaagtcttttatctgaaagcatgccgggttcggttaggtagcgatttgattttattataaaagttgattttctctgcaaacgaggtggcacgttcaaattgatggaaggagacatgaaaaacgtttacttccatgtatgtttaggaagttttaatttggtcctatgctctgggtatttcatgtattttaagttccttcatcgcatacaaaacaaggtagaatacatgtgcatattaatggccaaacttcgaatccatgtatttcaagttttcaacaactccaaactttggcgcgcaaattattttttaggaagaaagtaaacaataggctggcctaaaaattatgcactatggtcgtgtagaatgtttaaacaaattcagggatggttcttgccataattttaatttgattgaaagatggtgcacgcgcaaaaattttcaagtgtcgcgattgaaatacatggtttcagagttaatcgttggtagtgtaagtttattctcaagaacgacgtgttttgtgtcgatttgcacgaccaaatgttgcaaaacttcgcatgtcaattacgtccgactcgtctcatttatcttattttaatgaacacccattggtttttttgtttttcaggtgagttgttttcttttaatggtctcaattttatcaccaaggattcggtgagtttcttccaattattcacattctcgcgcaccttcaaatcacccacagacgcccccctcccccgtcgcgaaacggttcaaggcattccggaagcctttcagttttcaagtttgcaacagtattttgcatttcacagtccttacgagagacgccttgcaagtgagtaaaataggtattttgatgcacacaagagattacagacaacattgtacttttttattacgaactagtgcacgaaaatcgtggtgcgtatcataaaaaactaggtcacactccaaaaatcagaattttcccttatcttatcacgtattttcaaatttaccgccaaagcaggaaatgtttaatggtctttagcaattaggtttgtccagagagagatgtaagagtacccacttatcttaatgaaacaaaataatctctaaagcttttattatctcgtgtatgatttcaattgtctcacagagtttgtattttaaagttcctaaacagaaacgtttgaaattatgataaggaaaattgataagtttgttaattaggtttagttttcttatacctctttctggattgtttgaaggacgacaaacagtcggtccggcctagaaaaagagttcgatttttgatttgtgtcttccgggagaaggcagcgtggacgtccagtaagaagttgacgtcagaagatgggagacattaaaaggtatcatatttttgatgaactaaagggaggaaagttggaccgctttaagcagaaagggaccaagccatatcagctatcgtcaaatttagttgggcaattcaattttatacttgaaaacggttgtgtggagttgtgtgaaaatttcagtgaattctccgcaaagtacgatacaaattccttaaaattttcaaaggaatccgcacaaacgttcttttgtaaaatattaaattgcccagttaaatttggcaattgctgatgtgcctagattcctttctattaaacgccgcgccgtccagttttgatggcgatttgaagtcgcaaagcgcccgagtgcgccagttcagcgacttgaatatgtatcaattcgctgaatattcataaatttcttcctcctcaaaaaaaacctaaataatgtaaatatgtaataataatattatatgcccaaataatgtagtttctgtcactcagttttatctacattgaaaaaaagttacgggtttggtgggcataccgtccattccgggcttagaagccgaaagttccggatgctacgcccggaactttttcaaatgtagaagaatttgaatgtgaatttcagaagaatcacaagccaacgctatacaccggttgaagtttcaactcgaacaaccgtgcctaagcttcaataattgatgttgtaaaagatgcgtccacgtgttatgcgtcagattacaggagcatggtctgaaagcatccgtattttagcggccacgcttccattcatcattttcgcgctccttgcgccacacgcatcctcaccattcctcctcgatattcagccgcgccactctccgcctctgaaatcatcgcccaccacccacggctcctgttcatcgatcgcagacctctcatcggagcatcagtctttagcaatcaggaatgcatcgatttaaatatttgcgaccatccgtgaagaccgaagaatccgtccaaggaccctcgaacgatcggagggatattttagtcagaaccggtgttttttataaggtgtggtattcgatgaaaatgtttgaaaagtgcgtaaaatatttccctggcgcaggagctcattctgtattttacattttttagaatctgcaaattcatctggtcctaactgcaagtcaaaaacttgtcagaaatcttcatccaaaatgccgaaatgtcattctcccgatattcattaaatttgagttgcattcttgacttgagtaaactttcagaactttaatctcaattctaacgccgaaaaaacaattttacaaaaaaagggtttttcttgcatgcctcaggagaatgaaaatgtgatgttaaaggctcgttttaaaaacgaataagtgtcgttaaaatggggaccaattcgatttttcttaaacttcctagattcttataaaattccacgttccatctgtattggtatcaccttatttccgacgaagttatataggtgcagaggatcagtcgattaaaggacgatatctgcgacttttgcaggcatttccgtgtgcccacaatcaggtgccatattatctctaactatgtcgccgccagcacattttcctttccattagagagccctgaccccttctcttgctcttccgtaaggtgtccgagctaggaacaatagatacaaccgctccgtttgagagatgtaaatcggatgcaaatcaatgtggtcggattccgcaggcggccgtaactcggcaaggccgttcgtgcagttcggttttggaacgtggctccgatatcaatgatctcgcggtcgacagtggggcacgctcggaaattgggccaatggaagccggcgtggcgaggagggggccataatttgacagccgattttattaacgatctcttttaccgcatccatttcctgaacccgcccgcgcaacaacaacgcgaaactcgatgacgtttcgacgtgacgaaattctggatccccccgcagcgggggagccgcatgatgaatgatcggtgtatcttcagccttgaacacggtgtagcagcgcgagtggactcttgagattgtgacgtcaccgggaaatcttcatccagggtgtctagcaacctagaaaactagaactactcgtaatcatataattttcatcaagttttagtgtactttttcactttgttgataattgccagaaaatctctcaaggaaaattccaacagtattttttattaccctttgcgagtattcagtgatgcgatacttgatgatctcatggatcttgactataactataagagtctataagagtcgtaggatgactacctccacaataaaaagagaaacgtaaggacatcaatgccgcttttgattttactgatgatttcacctttgacatcccatatcgtgaataaccaaagaccgaggaaatgcataagaaaagcgtatgcctcgtaaaaatgccaccgccccccccccctcccgatgtgatttgaattgccaactgattttcacttgaatgcaccactgaatgaatctgactctaaaattcagtctctcaaaacgttgatctagtagcttgttcaacatgaatgagtcatatgctgggagacttaaacgatcggctaggaaataaataccgttcgactcattcatgttttgctcactgagggtcgtagatttatctatatcttttcattatttgacaagtagtaagcaactagactcggctttggataactgagaactcttagaacgtaaactcgaattgacagagaggtcgcaataatatcagaggagggaagttgccaatggtagtgctccgtctgcaacttgcctatttttagacctgtctctctagagatacgaccaacgaccaatgatcgttgtacgaaattatagaattttctttgcaaaatctttccaagtatttaatgcaacatttttaggcattatttcttggaaaaatagaaatatgagcaattaagaacgcactgcaatgaagaaacgcgtgtacaggccgatgaccgcaagcattaccacgtgggcgaaaaaatctaaaacgcctgcaatatttcgtgtatgcaactcggacatcccaagagctcgaatagttgtatctaggagttttaattaaactgcattgcttccgttgcgcacacgagttgtacataagtgtggaaatacgctcttaagtattaatggtttgcattatttcaattctattacaacttctgaagtgaccaagacaatgaagcacggcaaagagaaatactgtggccaacgagataatgttgtagataggaaagcatattaagtatttaaaaagtacagttatcttaaaaattcatatcgtcagtaaaattagcagtaaaacccgcgttgaagatttcttatcttattagcctttttaaaaagacaatcgatcatctacattgcacagatttaggtgtaatttttttttattccagttgaaaatacatgccaagaattccatttgctaatatcaggtgtaattttttttttaatccgaactttaagtgggcaaaaatattaagaataggaaggccttttcactctttcttgattcgcccctaagttttgattaagttgttccctacctacataagtagggaaagttatttattattacagttgttttgacccgtcgattgtaaagcacgtatttgacttgattttgcataaatttactcatttttgcggaaggacgctgtattagaaacattcctggacatcttggtttggtatcagaatctgagaatcgacagctacattttttgtggcagaaggttggctcccttttgggccctaaaagctccatatttcaacctgttcgtactctcctaaagtgagtactcaagttttgagttgaatgacgcctcatacattttaaaacaccgtaattaagtctcgttttttttagtttcattgtctataaaggtctttaactcggaaaatcggagtttgcgaaacggccattaacacgcgacatttgcgaggaataaacgctcctcgcaagcgcagtaaaagtggctggatgcaacgtccaaccacgtgcggcccctgggcagtgcctcctcctcataggtcagtttcgttggcgacgtcggccacgtccgtgtccgcggttcattatgtcagcgaacgaaactaatagctcggctgagcgttaacgcgttacattgtccgaggcgcggcgcgacatccgcgcggctcttgactttcgcgagttatttacggtttccctattaaatttaaagcgacgccgactcataatttactcggacgcaaggacggcagccgtcgccaggggcgctgcagtcgggtcctttgcgctgcccccccccccccccccccccgtcccccgctcttcgcgtctcctcgggcgctcgtgtcccttcgagacgccagaatccagattcctcattttttagatcaaggccgggcggccccgaaatccgcacgccgagaccggtcacaggtgcgtcatctatgtactctgtcgtgcggaggaaaaacctcgtatcagcattcggatgttgacaaaatgttcgctcctctgacgtatgggcgtatctctattttcacgtaaaccctgtcttaaatatatgtctatgatttctagggctcgtgcagaaatagagatacgcccttacgtcaaaggagcgacgaaacattcgttgataaaaccctcgttttttttaatgttcgtgcatctttttctttgattttttcgcaaaatattgtttacaattcaatttgacgaacttgaaagttcaaagacaatatgtcaccttctggtcaaagtatcacaagcgccatgccatgtttcaaaatttccgccgccaatttactttttgcagagaaatttttgattgaatttgtttgaaaatttcgcgaaattttatcggcaacgcaaagaaaattctgtgaaatttccggacagcttcgttcgtcaatttctctgtaaaaaaataaaatggcgtcggaatgcttttaaatgtcgcatggcgcttgtgatactttggccgtgaggtgacgaattatgcatgacctttctccaaaataaatattttattagtaaaaatttggcatcctttgaatgttcatttggagttcttgctccagcaaaaacctcccctcataatcccataaccatcataaccattataacttcatgagactttgcaaatccgacctttgcgctccatgattggaccactctgaagtgttttgggatacgtcaccgatagcagcaattgcatcagatcgagaccatccattcgatccatgattaaatcagctcccaatgctcctgctgctggaagcagctctttctgagagattcagtatgatgcagcgcatatcctcccctccttcctctcacgcgcttctgttttttcctctttcttcttgtctgtcaagggtaacactgttcgcggaaggtcgcgcctctcaacaaaaattctgcaaattagctgactcagtcaaatttcttggatcattcggcgcgacgttatagcattcatcgacttcgcgtagttttttttgtgccaggccgtccattctaaattatgtagatgaaaaaataatgacagattgaatcatatatcaatggttaaagtctgaaaatgcccaactccattgcagtgtttcaaaatttttagcaattgtatattttgtattagaaatgaaatgtcttgcaattttagtcctgtatgtattccacgcagcgaaataaattatcatcggccaaaattaggaaaaatattttgcaatctaccttttcagaatatgaagtttcactgagaaaaaactatggcttataaacctattagaggtaaatatggaacactactaatagtagtacctctacatataataatagcacatataccttagttatggtctctgtaccttaattaggtacagagaccatagtatggttcacagaccgagaatcattagtttatttacgactattataggtgttccatatttacctctaataggtttataaaccatagttttttctcagtgttgaacgggcttttgcaatgggacggataaaggctcgagcttgccaatgtaatccattaatattctcacctgttttggcgccgattgtgctcatttttttttcttttttttttttttttttttttttttttttttttttttaacggtttgttagtatgacctaatttttttgtctaatttttccccggtctaatttttgatcgctaaaaatcgtatgttttagtagcgaaaatgtttattcttagggtaccaaattcgttaaagatgatgagacacattagacaaccagatcaccatttcaatgccattttacctactttctcaaggagtttggaagacaaggcgcataagtgcaaattttgctctttctagggaacgtgtttaaagtttcggttccttatggcggaaagaaagatcaaactgacttcttgctgcctaaaaattggaatttctgagcgaatttttcgcagaatatgcattcagactagttttacttgacgtaattaacgcctcgattttttcaaaaattgcacttatgcgccttgtcctccaagcccctcatttgttctttcaaatcgatcctttacttgggtttattccatattcaaatgtctacagcctaattcttcgcacgcgctgcttcacaaatttcaacaaatttttatcacgcatgcgcacggttggagaacaaaagctagggcacggcactcgaccaatgcgagccactttccgaattctggttcaagttcaagagcggctgaaaatataaagacaagcattgcacaaccgacgcataacttaacagagctcgtattttttgcggctagagattcggtggctcgtcctccaaagaatctataaattgacttcatcttgaccttacagtctcaattcaaactttaaaaaaattcctcaggagaaaacgagacgatactgccaccagcaaattctcagatgatgcaaaatgagaggaatgaaacgaggaagaacgaacctgaattcactttgctaattaactttcagtatgagtgcttgtaaggatgttcataacgcgagaaaaatttgaatttttgaaaagatgacatttggtggtatcatttataggtttatatttaggttgaagctgttcaaaacaagcccataaagaattcctaacttagtcgtttgcgcacggtatgaaaataatgacagcacatggagaaaagagatgaagttcaaactccagactgcactgagaaaaagctatggtttataaacctattagtggtaaatatggaacacctataatagtcgtaaataaactaatgattctcggtctgtgaaccatactaaggtctctgtacctaattaaggtacagagaccataactaaggtatatgtgctattattatatgtagaggtactactattagtggtgttccatatttacctctaataggtttataagccatagttttttctcagtgtgccgcattgtggttcagtctgtcattttagggcgttcttgaaatatgcatagaactcccctctatcttctggttttaataactccatttacagtttttgtgctaggccaagttactttttcccgtgggtgactacatgttcaaaaatcaataaataatagaaccttaaaaaacgatcttaaccgagattaaacgattgagaaatgaaacttaagttttgatggttttgcagcgtggagagtcagtggatatcgacgtcattgttccctatgttccataggcaatccaggcctgcaatctgaagcaacggttaaacgaagagctaggcagagtgtgaacgcgaggtgaggaaagggtgctcggaggctgcacttgaaactgtaattaggattttgacctttccacagcgacagacatcgaattgacattaagacgttgcccgccaagccggtgacttgtcgcgttcccacaggtctccctgcccccctcccccttagggtagtatccgccatttgcaaattggtgcctgacgtcaacagtacctgtgcctgtcgccagctattgtgatcgtgaagtacccatactttctgaaaaagttcaaaggggggggggggcgttacgcaggtcgacgcttttctttgaactcagtggttttttttttttagaaagatagctatttttcgactccaaactttactttccctctcttttgttaatttgccaacatctatgtcgcaggccgacatttctgctgtgctgagaaaaaactctgtatggccattcaaattatgccaaatttctttggataatttttttcatttttgagagtaattgtggatatttctcatcaaaatgttcagatacactaaattaaattaaattgagattgaaaagtatctttaaaactgaaggaaataaatctgttatcaagaaatatttaccaaactttgaatgctcgtttgaggtttttcttatagctcggaaaaatattcaaattccccatttccttaagagcctcgctggttagtctggttttaagggtctactaagttttgctcttttttggaaaaccgagcaatattgattatattgaatgttcatgttgttgaagtccaaacttttcaggcaacaaaaaagtatgacctcggagactcttgacaaatagacaggggcaagggtagagaccaaaaaatttggaacacaattaagctgagctttttatttatattcacggcgcagcatgttttaaaaggctatcactcgcctattaagggtcgaccaaaatcttaacgagcggcattttagtgcagaagcgctcatgtccatcttttgcctcgccaatttttacggactcgtaaaattcttgagctgaatgaaccgcgatcatcgcttgagcaaggagataatcgttaaagacgaagatcaaagatttgcacgtttagttttaatcctcttttcggtactgtatttttttatcacaagtaacaatgatgagcttaacatttttagtgtttttttcttcttaatgtgtgatgaaatttaaatatctaaaatttacacaactttaaagggctcttcatcggtctgttaaactgagacacttgaacagccggagtgagaacgctgtgattggccggattttcgatgctctttaagtggcctccgtcgcgtcacgtaagtagatcgaaatctacccgagtcatgtggcattactttaaataatttgccaacaggccagggttagatcggccaattttggctgagattacccgagtagaatcttttgctcaaaaaattagttgttcccacgagtatttattcgtaatgtttggctcaggagccaaaatgtctatgatatatgaaaagcgcgttaggacgggtttttttcaaatgaaactctaacggtactgagttaaaaaaaaaaaaaaaaaaaaaaaacttaaagcatttattctgaatcaaattgataatgaagtcctcatttcttttaaaaacaactaaaagtcgttatcagagaagccacccctttttaaacaaacttgaggtctgctgaaggaaacattcaatgggacttccttttgatacacattaaaacttttcccgatttgtccattttgattttgtgatgcaatcttccccttcttcctctttccttcttcttcatctcctcctccttcaagacataaaaaaggtatggtaaatgttaccagaagtatgggaaattgcatcatgattgcccttgattttcgactcaatgatattgtagggtaaagatattagacggacagatttctaatagcatttaccatacttttcgtgaatgagattaaagaaacaggattagctatcgaagggtttacttgtgaatatcatactcatatagtacctcaaaccatacttctgttttagtgtacctttcatgcctattttccttccttctccatcttcccttcattctccttgttcttttcttcctgttcctccccttcctaccttttctccctgaacctctttatctcttctttcttccccccttttatcttaaccctctgtctattcgtcttcttctcctctccctcctccgtatccttatatcctctccttctctttccccccccctcctctttatttgtctctctctcctcttccttctctttctcatttctcatcttactcttgtaaacgtagcctctaccttgaagattaggctaagtgatgaacataataaaattttaagatccacaagttcctaaacgattaattaccagctttccttgacagtgaacagtctgctttagctcaaccatgtccaaaatgtccactttagaacatctggttcagaagtgatgatgggtcgcagtttaaaattatttcaagtcaagtgtggttgatcacttaaatccaagcgtcacgtctgtgtgaagaactttcaaaccgtgcaaaaatttggggtcaccacgactacatcatgctgtcaaatgagttgccggccaataaatcagacttgttagcttttgtctgaaaagtcgtccaggttccgtgcatattatgcaaatcccgtcacgcgataattctcgcgaaattaagcagtttagtcgttaagcccaagtttttattgcgtacacttcatcctgcattgtttaaaatgccctaccaattggccgataagaaatcgtgtatatgtatgcgcaaagaaatcgtctcgttatctctgagtgtctaaaagaacgtatctatgtcatatatcgagcacagcataggttcttttatatcaggtttggatgggtcattttttgttccgaaatggttgccaactatgagatgtctataggccaagcaacaagaattgtcataatttaattttaactttttaattgcagaaaatccgtacaaaagtgccataatctcatgattgtacagctttgcgtgatagaaagagatgcgatgagacaatgcaactctgagatgttgcctttttcaatctaaatgcttacagatttcttcataataccagtaaatgtcgtccattagaagatagctcattaagagaggctgctacattattatttttccagaaaatttttcaacaaggagaaaggaaggaaaaaagaagattaatttctgtttttttttttttttctatacagcaatagtttcttaaaaaaatatgaccgtttattagccgtacaagaaattgtcatattttcataaagtgacttctatctatacatatagacaccgtgtcatgtacctaaaaacgtaccccaacgttacaggttcttcataccacaaaaaactttaacctcgtcaagcctaaagattaaagtacaatatgtagccacttttgtgtaaatatgtgcatagtagagtatttctttgtgacatttgtaatataattaaggctcctcggctttgagctcttcattttaccgagttagattatctagagtctaaaattttttggacgttattgaagtgaatgcatcaattgaatcatcgcaaaaacgaaaaaaaatgaagaaaattcatgggtttttcgtgcgcttttacgagtgtgagtattaaaatattttccaatatttcgtcaaattccttcaacacacctgcaccgcaaacgacaagactttaaacgcgaactctttcaaggtcgtccactttcagatcaccgtcactgcgcaggttacttcgttacctgaaatattcggacctctcgccaaattttgtaatagacccggaaaaagtaggatcgactttcccagttgcttttaagaaaaataattcttatcaattgggacattcccgatagagtaacacatttttctttgttctcacccccataacgaaaattcggactcatgcttagtattgtctgccggtaggtaagtttttccttcctgttcatcgcagttccaatgttttattgctcaacaaccttccctccctcgtgggaaaagtacgcagtttcagtttgatcgttacgtaacgataggtttcagtcgttacgcaaactcaagccccccccctcttccttaagtacgttacgtaatttgaacacttccacaccaatggttaaaccatcaatttaaaccaccactccttgagaaacaaacgctctacaggtaacagtcgttaaaaattaatcctccacaggagagtcaagtggtatttttggaaaaaaagtgtttctcgtaatttgcaaaattcaactctcgggttactttgtaaaaagaaattggaactggttttttctgctcattatttgcgtgtggagttcattcgcatcacaaactttcgtatgtaacttttcaagttttagggcattttaaaaaaaattacgaaaatgtcacgtaaatccctcaatcgtaacaatccttatttattcagaaaaaaagtgttttccatatttctacccggactcactagcatggcgatccgcacaagttaacaacaatattttacctctttttaagcctattatagataatcgattctaggtaccgcagcctccttcgatatatatcgattattttacatgcgttcaaataagcgaaggtgttgtcagtgctgctaacttgcgagaatcgccgctatacgtacttgatcaaaacccacgtggctgaggtattataaataatcgattctgcagcctctttcgatatatatcgattatttaacatgcgtttaaatgagcgaagcagtgttgtcaatgttgctaacttgcgagaatcgccgctccacgagctgaatcgaaccccacgtgtctgaggcatctcaaagaggaaaactttagcaagtcattaagatcggcgcaaattaggcactgtaaaatctcaaccgcagccgaagcggcgtttatataagaaaggtgtgtccaactttgagtctttcgagaaaaacggtggtggaggtacttcaaaaactggcaagggtaatcatatcaagatacaatgacagatcggttcgttgaaacgcggacagacacacgtcgcgccgcggtgggtgatgttgatgactcgatgagtcacaagccaatagtgcgagtgactcgcagcgagttgcgagtgctacgaccgcgcgcgaggattataatgacatcaatttaaatgcgagccggaacgggcttttcgctttggatttcgattcccgaacaacgataaacagttatgtcgtctctattactatactcgcgagtataaacgcaggcatgggtttaatctgcgcccacggcgagggctctaaaatcgtatattgcggtgcggaaacacgcagtctccttttttccgtaacgcttttcttggccttgttccatcaaacttacgacaagtcttattcccttcgtctagtacaaaattgacaccaggctctatgcttcttgcttgttgagattaggaactaaaattggacggaaaaaattaagcagaaaggaaccaagccatatcagctattgccaaatctaatcgggcaattgaatttttacatgaaaacgggcgtgcggatttagatgaaaaatttcagtgaattttctgaatagtacgacgcaaactccttcaaactttgaaggaaattcgcacaaacttcttgcaaaaaattaaattgtcaggttaaatgaaaatagctgatgtggcttgattcctttctgctaaacgtgatccaggtgatagccgtcaaacggcagcagtaaagtagtggcaacctacgttccgctgaaaaatgagatgacataagtacttttgaattaaacgatttaattttttaattccacttcaatggttatctctccaaaaatattgacattgaagacagcaagctcgtgaaaagtcacggataacctgaaaaaattagtaaatattactgagccgtgaaaagccagggaaacgtttaccacattctgttccaaagagtagatgtatctctttgaccatggctttggagactgaaacgcaaggtcagaaaagtagactacacgttcttttcacgttttaatatttaaaatcctcacagtttttgggcatactggccaaaacactcgatacactaatactcactgagtaccgaaatgcattgcttcggagacttgaacgcaaggttagaaaagtcaactacacgtccttttcacaattttatgtttgaaacagcttaaagtttttggacatcagcatactagctaaaacactctaaaataccactaattatcattcagtaataaaaggcatggctcataggtggatccaagggggggggggtgcacgccttccccccgtttgcccgaaaaaaggaggaagaaaaaagaaacgagaaagaaaggaagaaagagcagagaaaagaaaaaagatggacggttatctttggtgattatttagcatgagattgacgcaaactgcatgtaataagactctttaaaattttgaaaattttctggggaagtcctccggaccccccttttgtcctccccctttcaatgtgtctgaatccgtctatgaaacgagtctgtaacgaagtcggaagttgtcgaaactttgtaagctcatatgttctgtaatatgaaacaaagaacctttacaaagaacttgaatcatgacttgagcaatcattttaatgcacatcactcaactaggatggtgctggaaatcgggggattttccgactcgactccgcgtgcgagtaatttttgcgaggagcgtcgatctcttttgtaaagattcttgcggagtggtggctttgttgggaactcgttcaaggtcgtccgcgctaatttttcaatttcatctcatgccacgctcatcttcatcgtcagttaccaccgttgccatgtagtgttcacgccgaggagtatgcatagtagttactctctaaggcattgaaccgtttacccgttcgtattcaaagtgaaattacccattcgttcgttgagaaaggcttcatttcaggaaacggatgggacaggagcctttcctccctcttgaacttgttgttgttgaccttccttggagagatttcagtcagtttccataaatttaagggctattttaggaaatttctgaaaattcatcccccctcccccttcaagcgaatcttgcctcgtctgagcacatttcctctatttccgatcaaaattggctgtgataatggtttacagactttgcatacaaatcagaagacaacgaaacttttacaagttttagtctttttaaatattatatttatatgatttctagtatgtgataatgagtatatactcggagacatacgctgcttcataactgcactgctcagaaggcttcggtaaatttttaggttttaggaggttaatttatttcaatttatcagcatgagaaccaccgaatgttttatacttggctagttgtgaaggcagcgtggagatatacttataattttataattatacgactatatattgcgactataattttttctaaatatgaatattactaataaatatgcttagtcttgtaactgaatttgacaaagggaaattctttagactaagtttcaaattttcagtgtatctggcaatgtgtgatccttttgcggtttttcccgagcaagtggcaatggccacatgggattcactcgggaattttaaccgctttgccgtaaaaagcgccagcgttactcctccctctgtttgaaatcctcaacaccattccatcatctcaactccatccatccacttttctcgacccgagtttgaccttcgtcgtggtagcattcaattaaagtgcaatcagttaccgcatgaggattttcatcggacactcaatctaaatctcaaaacctcccttcgtaaaagtaaacatcgatgatctccagatccacttaatgatttgtacttgcagcattacaattatgtatgagctctccaattcttcattttttaccttatttcgttcaaagtaacgtgttgatgagcccggttttttttttttttttttttttaaagaaaaaacaaatattgtgttgttgctccggttcttcaaaaccatgtattgaaatgtttgcttttgaacaattcaaatcttcctttatcgtcatagttctttctagagaactaccgaattgatatccgtaatttttttcggctacttgcaggtgaaaccgctagatgatcccgcttaatttaaagttttaaaatttgacccaggaagcagttccctgagagtgtgaggactcctctaggggttaggccatgtagcggcccggaagatttaccctttagtagatttaaagactttgaggatctataattataatcaactttaaaagttaataaactctacgcattgtgaaaaaatgttcaggaacaaggaaaaatatgctggaaattagtgcgctcttaaggaaggggtcgcgaagatcccttaaagtttctagcctataaatattttttcctggcggtacagagtttattaaataattaatctgagtttctcacttagatactctttgatcatccaagttgtgtcaccagattttgccgaggagtgaatttactacgagttcattcaactccgagtaatttgaacgactcgttcttgcaacttttcattcaactccgagtaatttgaacgactcgttcttgcaactttcaatgaatggcgcgtattatgaattaggagtagtagtgaaatgaaaacttcgtgtattgtaaaaagagcataagtcacccattatttatttagaaagaatctatgaatacaaaaatgcgtcagctaaacgggcgtaattgatatatatgtttgccatacgcgcgtaaaatttcaccttggcagcccagttaaaccgcggtctcgggccttcgaaattcttttaaaactaactccaagtcgttgaagatctccaaatcgggaaaaataccatcttctgtcttctctttactcattagtatctctttcaactcacgtcaaactgattaacatggattacgtatcatgacgtagaccctgattccgtatcaaacgtgaaaaaaaaaataaataaattgaacaaaaaaggctcaaatttgaggaacgtaatgaaaagtgggacatcttaggtcagaaaatgcctaataagaacgaaataaaaaacagaccaacttactgaatcgctactcttttcctaaaagagagcaattttctgaaaaaggcccatgaatgatcagtgcatacgaacagtgcataagatctgatcattctaagaaatgatcggtgcacacgtaatgtatttaaaggaattaagaaagaaaaaacttcggttaatcttttactgagatgagagcttcttattcgattgaacacaagaattccacacgatgcaaaatggtgaccggtttgagatgtaaattgctttggtgtgctttccttgtttgaaacaccggtccaaaatgcaggcttcggactcgagaaaaatacggataaaatacactaattttagcgctgcgcgctgtagattagcagaatttttctcattcttctactccctcctcttcatccatttttttcccgcttctctgcgtagctcgcagtctcctgcttggctgagttcattcatgcatgattgagtacactccttaccgggttaataattaatgacaatgctactccacttcaaaataaaagaatgcctaccttcctcggccagtttaattattttttcccctcgaattttggtcgttgaaaaaaatcctgtcttgcgatcatgtggtcctaacatctaaattaaacgtgccagtaagtaggaaatatttttggtcttatttccttccctaagattcgcttttttcatcggtgatcgtgagtgaacattacattaagttgcggtgtttcaactgcagcatcaatttcattatctcgcttcttaacagatattatgcctaatatcctcacgacaatacgaggttgaaagaaaaacaattgataagaaaatgtggaaaatgtctatttttatgagaaaagttgcatccgcccggcgtattccggggtagaaattttattacacgcgcacgtatttaagcgactcatttaaagccaatgcgactatcgcttggtagcgtaatgtcctcaaggatctttgagatacatttgatttgatagttgcagggttatgagacgaataccgtaaatatatttaagaatgaatcagtagcgtctcctttaaaagttttccaaacatcataggaggtacgtttgactttgagggaaggcaaggcatgaagtccgccatttcaaaaaaccacacatttacctttagtcgtgccgagtgctcagcatatgggtttagcaacctgacttgtaatgatttttaatctaataataaatattttatcgtatcactaatacccttacttctcgctcttcggatgtttcagagagacgctacgcctacacagagaagcagcgatatgacgggtggttcaacaatttggcgcatcctgattggggctccatcggtaagttttttttttttaacataatattatcaaaatgtaaatataatgccttattgcgttcgagctttcgaacttttcattatttccgttttaagagcttcagattgatatatttcttgaaaagcatgtccacgctctgaacccttgttaaatcagataccttaaaaattaagggaaaagtcaagacttgtcagtcaacatcccaactgcagaaatcatgaaactcggctctgtagatttctggaacaaattatatgacaaaaatatggtaatttagagagccagagagcttttactgccgttttccgcgcgagagaacgtaactccattccaaggttgcatatacgtgcaccgagcaatacaattttttacaagaatgcataattgcatactgtgcaattttactccaaaatgtttctgatttttgcaagaaatcagaagataatcagtaaaacttttagtcagaaatgctcaagattctcctggcaaaactggaatttgcgcggggaaattaggcaacactcaacttttgttacgctctttcgtgagggggacgacaatatacggcgtcagttggttccgttttattgaatgcaggccattttcattagcgtttgaaagacgacggttgcatcgaaagtttatcatgcaccctcggatacctgatcccggcgatgagttaggagacgcagacgcgaaagatggagtataccacgaggccacgccataatgttggtacagttagtcgttgactgtgcaattaaagagttggcttcctgcctgcgactccatggggtagacagggggtctgcaaatgccaactctcgtagtacaaatgcccggatattttagttgggcaccgcgccgccgttgcctagattcagatccccatggttcgccgtcacacagtggatcactggaaaaaaaacacattgtatccagagtccagattcttaaaaacatcgagaagaaaaaatactcttgattcaatcagaatctagcttaaatcaagaaccaagcctcttaatttaagcggatttcgttttgattcaagcaaaaatccgattgaatcaagagtattttttcttgtcaatgttttcaagagtctggactctagatccaatgtgtttttttttccagtgttgaattgagcgtataattccctggaaaattgaaagaaaaatatttacaggccctgaaattcgttatcaatcgcagaaaaattggcgaattccgaaggccatgtatgatcagctcttctgtagcgtgtcagaactctggctccgaggctcacaatcagcctcagcaacctccgcctcttgcagttctatttgggcttgtgtggtctcgccctcccccccccttcctccccttcacccccctccttcgaacggtggtttcgttctcggcaagttttcgctccgaaacccccacgctagaccacgaggcgaaaagtataattgaacggatattagtttttaatagtgcagcacttaaaagatactgaggtgatagggcccgtactccaactgtgatcgaattaaagacaaactttgatacccatgcaaaaaaaaaaaaaagagagagacaaaaggtcacttttgtgcttgagtttcaagaattatttgcaaggcaagacaatcaactcgcaaaacacgaattaatgaggttaaacgtagaaaattgccacatttaatctggaaattgacaacctcatgaaatgcgatacttccttcgaggtcaaatcgtgttattaagttttccgaactttgcattttaccaaaaaattaatgttgattggtgatgttgactggctcaaaattttgcggaccgctaaatgatcatccgtgatcattaattgctaacaggtgtcatatatccggagtttacacagaggcgcacggtgaggttgttcattgtaatgcaatagacttattttcttcataatattccactttttctcgcgaaaacgtctatgactttgcttatctgtgtgcgttatattccgtgaaaattttctttaatgttcatgttagttacctctctgtcaaaaaacggaatttgaacaagagcttttaaaaaactgcgatcgagatacgtttttgagaattttaccatagatattctagcatgagcaccaattcaagctctttattttaatcatgtagtcatacttgtaaaagctagataccctccccctcccccccccccccccccccccaggttcaaaccgatggaccacaagttcatgaacacctatccattctttgatgacagtcgaaaagacttactgattggcgtttttaaacgcaaaatctttgtccgtaggtaaataaaattcgtttattttagttacaacgatgcgtgcaggtggcgaggggggcgaatgagcaagtgacaacgccactcgaccaatcagccacgtgattcagttctcctctcaagcatcggcattcgttactcgttattctttatggatatcgcgggcgatatcccgatatcagtcatttgtaacgtgagtaatgatggtctggccacgccctccacctttcaactaccgtgccctagtaagatccttttgccccgtgccccttgtgcccccctcgtgccccttgaacccccctcgccgtatacgcactcctcatccagtcatgtctcgtgcggcaaataaatatcagtcgcgatcaatcgctcatttgtattcatttctaacccctgctgtcggtcccaccccgttcgcatctcctagttacgaacgaccgtgctctatctgtaatttttcgattgtttaaagatcctttcgtttcctatcaaggcctctttactttggaattgaggtatatgcgtgggctggtattcaaatcgagacctttgactttttaacattaaatccgccaaactgatttccgctaaaattatgtgaaaaaatcgcgtcgctctacttttctatttatgcgttaaagtcgctccacatagaaggaagaaatcaagtgcgtttcagtaattatttctaattttttccagacttttcttctttaaaaaaagcctcttctgcaaaaaaccacctaccttccatcagccctctttcggggccccatttagaacttctgttgcccctatcttcaaataaggatacaataatgagtggaaaatgcttccaaattcagccgaataaattcccctaaactaatttattcctctccaaaacaattgatagcctttctatagcaaccagactaacgctcgcatttgcctgtatttattcatttctctttttgtctaagattaaactcatgtattattatcacttctaaaatgactagttattcaattttaattcaaattcatacgtaaagagcacttaagcatataagtctaaaataacacatcgtgagctctcaggtgagttcttatatcaaagagaattgtttcagcgtcaatgctaaggttatcttcgtttaaatgtatgagagtcttgattaaagagcctcccaaaatttggcccctttttaggtattcgattcgaccatcggactaaggtttaaatgaaagcttatagtaacagaaaactcaggaaaaaatttcaagatgagtatagggaccgttttcgagttacgggggggcaaaggggtcgcaatctggcctaattttttgctgttttcttgtagaattgatgtatcgtcggggttcttatcgttgtttacgcatgtgtagcacatggatttctacgtgtttttacacgtagaatcgatttttaacgttgccgaagcgatatatagatcagttaaatcgattttgaacgattttttaaggaaaatcgatgctatttcaggatcgaaattgtttttttcgattcatgaatgaataaatgcacctgaaatgactgaggcacatgtaaccctaggtattttgacacggaaaattgatttttaacattgacgagtcgatttatctacagtttgtatcgaatttttgcgactttttacggaaaatcgatgacttagcggaattaaaatcgggtttgctccatccgagatcggagatatgtacccaacatgattggagcacatcgactcttacgtatttttatacgtggaatcgatatataacctcgataagtcgatatatcgatcaactgtattgaattgatgcgattttttgcggaaaatcgatggtttatcgggattgagatcggtgtctctccgtccaagattggagaaatgtacccttcatgattggagcacatcaattcttacgtaattctgcacgtagaatcaattttaaacgtcgacccgtcgatatatcgatctgacatacacaactcttgcgattttttacggatattcgatggttcttttggattggcattggaaaaatctaacagacatgactggagcacatcgattcgtttgtgattattctcgtaaaatcaatttttgaagtccacgagtcgatttattgactggtcatattgacttcatgtgattggaaccaaatccattgacaccagagtgaatgagtgaatgaatgacttcacttaaaatgatttaaggagatacatacacgcatctacctttttatggaaccgtatgagaattccggatcagcatatttgagggaagataaactgtccctcgagttggccgagtatgaccgcaatcgataaatcgactcgtcaaccttaaaaatgattctacgtgtaaaagtacgtggacacggcgtgctccgaccatgttaggtgcatatctccaccctcggactgtaagtaaccaatttcattcctgatcaaaaaatcgattttccataaaaatcacaagaagtcaatacgtccagtcaataaatcgactcgtggacttcaaaaattgattttacgagaataatcacaaacgaatcgatgtgctccagtcatgtctgttagatttttccaatgccaatccaaaagaaccatcgaatatccgtaaaaaatcgcaagagttgtgtatgtcagatcgatatatcgacgggtcgacgtttaaaattgattctacgtgcagaattacgtaagaattgatgtgctccaatcatgaagggtacatttctccaatcttggacggagagacaccgatctcaatcccgataaaccatcgattttccgcaaaaaatcgcatcaattcaatacagttgatcgatatatcgacttatcgaggttatatatcgattccacgtataaaaatacgtaagagtcgatgtgctccaatcatgttgggtacatatctccgatctcggatggagcaaacccgattttaattccgctaagtcatcgattttccgtaaaaagtcgcaaaaattcgatacaaactgtagataaatcgactcgtcaatgttaaaaatcaattttccgtgtcaaaatacctagggttacatgtgcctcagtcatttcaggtgcatttattcattcatgaatcgaaaaaaacaatttcgatcctgaaatagcatcgattttccttaaaaaatcgttcaaaatcgatttaactgatctatatatcgcttcggcaacgttaaaaatcgattctacgtgtaaaaacacgtaggaatccatgtgctacacatgcgtaaacaacgataagaaccccgccgatacatcaattctacaagaaaacagcaaaaaattaggccagattgcgacccctttgcccccccgtaactcgaaaacggttcctatactcatcttgaaattttttcctgagttttctgttactataagcttccatttaaaccttgatccgatggtcgaatcgaatacctaaaaaggggccaaaatcagcctcttttttgggaggctctttacagtccgcgacttcataaagtgactcttgttgtatactttttatcctactaccagaataatggctcattttttcttctttttatttgcgtcttttctttattctcaagaccagaatccatctcttttccttcgtatatggcgagcataactttgaactatgtccgcccgcgcaacgtgtccgcgtcagaaattatgttcgcgagcgccggatgtgaaaagttacttggaccgcgttcagcagaaaggaaccaagcctcatcagctattgccaaatttaactgggcaatttaattttttataagagatcgttcatgcgaattattttgaaaattttaaggaatttgcttcgcactaagcagaaaattccctgaaatttgcacaaaaatccgcccaaccgttctcaggtaaaaaattatattgcctgattcaatttggcaatagctgacgtggcttgggtcttttctgcttagtgcggttcactcgagctttgcggtcgacccaggatgctcgtcgctcgcctccttctccggtgggcagagtccgcattcgaagcacgaattgaacgtatccatgctaaaaccacctatgtcccacgcaagccctattcacataattccttctagcagaagcacgtccaattgcagtcaatagcgaccgggtctcattatcctcgattagaggcttttaagaaactacataaaacaaagcgataagagaaaaaagggcattgcgcgactcctctcgaaatcatacgagcggattttttgcaggactcgtatgacaaggatgacgaggatacctacacagagcattgagcattgagcgcgtgaagagaatcgttaatcgccgcgaaacgccatgaaggcgcagaaaaaaggggaaaaagggcgaaagaggaataatcaacgcttttaattggcatgcgatcgggctctctgccgcagactcccgcagctatattagtgtatttattgatatgagggttttcgttgacttacgctcataaaccaatctgagcttgggcgcttgcgtaataagagatcatgaatagtggtatggtacacccgatcgccttatccactcacaacttttttcatgctccagcaatgacggcctcagcttttggtcccgcgtcggccgaggtaacgcggctgtcctctcagctcgccaagtcgaagctacccaagaaccaaacactgccgagctaatgaaaaacgccgttaggagcattcgaatgttgccatatttcctctgggagaatatttgttttttaaggaagttatgaatatttgtccgcgcaattttcagacttttcagatcaaatcacgaacaaaatcctctgaaaatcggaagagaaatattcacaaattttccagagaattcgtgatttttggaaagaaatttggcaacacctgacggtgcatatacggcgtttttcttcagcacggcatgcagaacagtgctgttcgtccatcagctctgctaagcgcgattcatgctctgcccgccaaaaatgggccaatatatagacatggtaagattaaagcatcccgcaagacacgagctcttatcgaaagttcatttacagcacgtcgattatattgaaagtgtccgaaatcaaccattagacacgttagcttttatgcttgaattgatattagcaattgcatcaaaattcaaacttcccgctcgctatacaatggccaaaatcaacgtttgttctattggttattgaaaaaaattgaacgcttggcaaatacatacagttcagtttcaccaaaatgttcatccttctgtaatgtacagtcctaaattttgtcttttacagttcagtgtatcggaaaattattctattttaaagtagtccagcctgtgctcaatatgaatcgagcaaatgctacttttgcaaagtttttttacgagtacgggaaatgataatgtttacgcatggttgaatttgggatatttttgacgaatctaccgtgttctgcgtgatattctatttaaataacatatgcttttcgacgattggtttctaaccgtgtttctagtgatacacaccggaaaaaaacacattagatctagagtccagactcttaaaaacatcgacaagaaaaaatactcttgattcaatcagatttaagcttaagtcaagaaccaagcatcttaatttgagcggatttccctttgatttaagcttaaatctgattgaatcaagagtcatttttcttgtcaatgttttcaagagtctggactcaagatccaatgtgttttttttccagtgcactccatgcaaccactaattttataaaggaattaaaacaaatcgaacacccttgtgtaagtttacgtccacgcgtctcgttagtttttcctcctttgttcagtaggccatcgaccactgagcgcactgtgtttcattcatattcaaaagtggttcaagacgggcaggcaggctctgtagtacgtctcggacccgacgcaacaacgtgactgcataaaaaaccccttgatacaactatacgtactcgagggatgtccgtgttgcgtgcagacgaaattgaaggcgttttgacagccctgtcccgcacactcgttcgtcgatcacgttgttctcgttgtatggtattgttacctgcagcaagctgccactccaatacgcaaggggtgtgagaggaatgagcaaggcggatctaaaaccgcatccgcctctctatgcgtgttcccttataaaagcaaagtaggagggaccctttgtgaccgtttttcagcctgataaagaagtacgtaaaactcgcattgtcatcccaaggtcgtagaggagaaaatacactgtagaacaaatgtgttacattaatttaatgaaaattacctctgccgtactagaatgcagcatgcgctataaggctatcgcttttctattgttacgagggaaaattacatgaaaaaatattctccgattttcttagaattcgtcagattcatctgtctgattccgtcggaacatatgagaatcgatgaatcttgccttcagttcttcctcggttgcaggaaaacaattgttttaccatttgtagttttcttgtcgttccctaaattattttttctccttttttttcttcctttttttactaaagtatgtatacacatgcgccggtggttaattaggcaatacgctagcctatggcgccgaaaatatggtcctttcgttaccagtctagtttatccttctcacgtcacgtccctcattaaggagatattttgttgctgacttaaaacgcgcggcaccactcctgtgttttgctttatactaaagggaaaaacctccgcggtgaagcgccttcaattattcctacctgcaacacgcccatccttggaacacgaatagttgtatcaaggcgccttcatcctattactcagtatccttggccctctcgatgatttcaatgtaagagaacagagctgcttgtatcctaaacaaggcaaaaacaaaagtagccaattttcaatttgtttcttctcataattcaacactcataagcaaccacataaaagtacaaattcactaattatcttagtatttactgagactttaatttgcaactctatttatctaattttttgtattctcggctttgattttacctgagaataaagtggacccagtactataattcttccatcttatcatgtgaaacaagaatatttattgccgtaatgtttcccttcgtgcatgaaaaatgtaatatccaccctttttctcctcaacgtaccagcaaatctatgaccccgacgaggcatgttgagtgttgagtctagttgcgttacgcgcgttgcgttggcctcaagatgctaatgttaatgttgttgttccgcgctcgcatactgtgacgtttctgacgtgtttatgagacgctcgcagcccgcgagtcttcagttttagagaaatttatcgacctaatttctcaatggctcggcgataaaacgtaaatgcagttaacggaaagtctaattacttgcagttttttcgctcgttttttctcgccttttttatgggtagtcgcccggtgtgtgcgtgtgagtccgagtgttgctgcttgtgtagatcaccgaagccttgcttgtttcagaatgagacgatgatctcacacttcacattacaagcgcaccttcgctttgccctatggccctctgttccagcgtggcaaaatttccaccaacaaaaatagcaccttcaagttattaatagatgtttcataaatgcacttatatgacacccgacattacttatttacgatctctcacattataggcgatttgattcttgttagagttttaaaatatcacgtctgttgattctttttgccttaactttgcacgcagaaacgaatttccgctgtcgcgtgagctttgtacacataaataatggcctgtgaattgaataaacaacagatttttgcctgctaaaattcaaaatggcaaagtttcctctgagctcggtactgtgtttgaatccgctgcagattcggtgtgggtgtaattttatgggtcaaatggatggaatatataacatgaaataatgaatcataatattgctaatattatgcaacttatttgttggaaattaagtgaaaggaagtactaaatattagcagcattgcgttgcataatggatccgtttgcctaaacttcgtccaaacatatgaatgaaagaccgtaatccaaaaaatgtttgtttttaatcgcgtagatttttacaatcaatttttcattcgagagtaaaaacgtgcttatgattcaggtagtaaatataacaacttcgttcatacaccgtgcaattattcttcttcatctacaaatatgcttctgtatgtattattctactctataagagcagcaagaatcttatgcaaagttggaaatcaaacatgttggaatattgaacagtcatcacattttatacactgatttgaattcttccccgtaattttacatgtacatacgttttctcccgcgagatggtacgtttcctctgcaatttaaatttagtcttcctgtaaaaaggagctcattacatcagcatcccgaaatacacatcaagtttcacaacgcgaggatttccctgacaagtggcaaccccgcttctcgaacaactagttaaacacttgatacttgaaattgagacaccaagacaggtggtttttacgaattgagataaaaggattgattgttaatttaaagatgctagaacgtcgtttacggcggggaattaataaattaaccgttctttgattagaaaattgctcgtgtcatgaaacgcatttttggtcgtggcggaccgcggaccaagagtcgccttgagcataggtcctccattatttgagttttattatttttttttaacgttctcttgttttaactaacggttgtgcaaggatctagctatcgcttccactccaaaagaattgataaattcctgttattagcgcgggtaaagatccagttcagccgcgccgatccgtgattcattgtggttttttttctatatctaaaatgaatcatatctttaaagaattcgaggtttttttcagtttggaatttgcattttttcaatgaaattatttaataaattatatgttatgaacggaaagaatggcgcattcagatgactacgtggctggtctgaaacgttttgtaagatcccagcagtgctcgagagtcaactgtcatccgaccttgaattctgtcgagactttttttcaggtttttttatattaatgtgctcggaggagttatttttattggtttattaagtttaatatatatataataactaagcgatagctgtgagtacaagctactagtcatatcgcacatttctacttggaaaaaaagctcagctcgtgctttgaaagttgtcaagaacaattcaaagtcccagcaactcacctagaacaatatccatacttttttctgtttaatttattgaccgatctgtagcattcctcagatataagcgagatgtagcgcgacggagctttttgtgtcttaacggttcataatttctgtgcacttatcaaccggaaaagtaaccgttataattatttaaaatgttgagtcaattttttttcgttgttacgaagaaagaagaaaaattgtatttctttttggaaaatacacttaaagagacattcgtgtataccacaacgggctagaaacgctcaagagtcaaaagtcgcacgtgagctttttgatcggctaagctcgctgattcaaggttatgcaacccaattcgcggcctatcgcatctaacaaaattttggctattttaccagggctatttttctgtagaaaagaaagaaaaaaaaaataagtaaaaacttctccaagcaatgagaatcataaccgaattttaagtttaatagatcgtatcggaccgctttcaccgtagacgatcatcgtgttgttttcattgcttgcttggtgtggagcctaatcttatcatactctttaatataaaatcataacgtaacgcttcacaacctaacgctatacggcgtgtccgcaactccttctactacatcacccttctctgctcattctacaccaactcaattcgctaccattccccactcagaggtctttctccaacactctccccatgaagatattgccagccggctgattattgaaattgattgacaaagctatatggacaatgaagtcaaaaaggatatggagggatcctatggcggaagcggttggctgcaatggacatataaggtaaataatagactgactaacggcaacccacgagagaccttatatttagtccattattttctcctttagtctataggaaacaacactggaaaaaaaaacgcattagatctagcgtccagactcttgaaaacattgacaagataaagaaatcttgattcaatcagatttaagcttaaatcataaggaaatccgcttaaactaagaggctgggttcttgatttagctttaagagtctggactctagatccaatgtggtttttttctttttttttctttctttctttctttccttcttttccagtgaaccatttcaaccagttggatcgctccatactcttcatgtgtcttctttgtctaccaatttcaacaatcagctcgctgagcttgatccgtgcgaaatagtggcgtgtcgtgctttgcgactaatcgattggttttccatttattcctacgggaaggatcgaatagcagttgtccgcaacgaacgccttaataatcgattcctcaccgtagcttcaaatgggaaaatatcgatagtcatggaggtgtggcaacgctcaactcaggtgcgacgtgcgagatatcgagttgcaaagagtgcattgcggtcactcccggtcagtcgcacaatttgacacggacaaactgacaagcgacctgcaagcgcgataccctgtccgatccacactgcagtgctaaggaagaacgccgtatgaacattcgagggttgccaaatttccttcgataaaatgtctatttttcaggaaaattatgaatatttgtcctttaaatttttcagaatctttaggtaaaattgcgaactaaattatctgaaaaattgggatgaaaatattcatacatttaccagaaaattcgcgttttatcaaaggaaatttggcaacgcctgaaggttcatacggcgtttttcgttaggacggcagcataggtcgctccagcccggccgcctcggtaggcatatttttcaaaataatgtgcatgggtgcagtgtttgtttacatttcccgctcccgagacggagagcccnnnnnnnnnnnnnnnnncctcagtgccccccccccctcgcgttcgttcgacgggcattcaagtgtcggccccggagaaggcggcttctcgagtgtgattgattcgtctcaggtgaaggcggaaattcattcagtcttacactcgcgttcacggtgcatttcgtcggatgcgatggatggtcgtctattcgagaagaaaggaagggttgaaagaggctctgatgaatgcagagacaagaagagatcctccaggagtatccggacagtggtagaaacttttacttttctgaaggtttaacgttatctcatgaatagcaactttttcgatggtttttgagtcttgggttaacggtgcgcctaactacaagtttaccaaacatcggctcgtttttctgaccgataagggtctatcaaacccgcagcacgctgtaattggatggaatgggcctggtgcgtgcaagatatacactagatacagccgagtgactagattttgctactagtgaaattgtataaaaaccacgatagataaccatcaaagaaacatcgaagtctaaaattcaccttttagcgtgaaatcacgcttttacaaatattctgcgtccgctggcagtttttctaagtcgccggcagtcaggtgaagaagaggaagaagaaggatgagataggggacgcgggtggaagacaccgagaagaataagattaggtaaaaaaagaggaaaatgagtagaattggaggtaagagaagagggagagggagaagacgagaaagtaaacgaaggaaaggtgttttttcccttcctcttatcgtcaccttccaggtaaagtatcacaagcgccatgcgacgtttaaaaatttccgccgccattttatttttttactgagaaattgttggttgaatctgttcgaaaatttcactaaattttatcggcagcacaaagaaaattcggtgtaattttcggacagcttcattgaacaatttctctgtaaaaaaatataatggcggtggaaatttttaaacgtcgcatggcgcttgtgatactttgcctggaaggtgacgttatctccttattcttctccctctcactattcctcattttctttatcttcttttcccgcttccacctcttcttctgtaccctccttcaccttctcttcctcgtcttcgcctttgtctcgtttctttttctcatttttctttcttcaatcctaatgtatcgtcatcttacatcgtaagttacgaatcgtacgatttgagcctttcagactagcaaattgctcaatagccacaaaagttcatcttaaaaatttagcgcggtactgctccgaaagtgggagctctcattggtcaccaattttcaaacgtatctcgaatatatttaacaaggtgcactctgctacatgcagtaaccaatcccagctcagtgctcgttcctactttgattagcatctgaagctgtatcatatgtcggcggcttgttggcggtaaccgagtgataaaggaagctccatcaacctggagcttttttctggagcgaagggttcctggtctgacacgatgaccctggaacaactcctccgtcgaagaaacagggaaagagagagagtgcctgccaaactcgttttttgttccagttagtgagagggcaggcggtaggcacacaacacaaaatctgatagtttctacctatctctatctaatccgtgaattatcacattcccattgtccatcgggaatgaagatgttaattgggtctttttatttcgcacggaggttcgaaatatatgactgcagattgtgacgtcgcacaactcttaaggggagacaaacaaactgtaatatacatattttattcagtggttgtttccacatactggggtaaaaaggaatccagcaaagcgtccttaagtatctccgaacaaaaataattcctattccaaaaaaatttaaataaaagtataaataaatcctatcacgtctggaacgttatcgccattgccatcttttttgtttacaccgagtcaaactagaagagggtatcacgatagactaaaactcacgaaccaatcagagatcagcgcattttttccgtagtgaaaggatcgagatggcaatactgccgtgctaaggaagaacgccgtatgagcctccaggcgtcgccaaatttcctttgacaaaacactaattttcaagaaaatttgtgaatatttttcttccgatttttcaaagaatttagtttttaatttgatctaaaatttgtgaaaaatttaaggaagaatgttcataacttttttcaaaagtagatattttctgtgaaaaaatttggcaacatttgaaggctcgtacggcgttcttccttagcacagcagaatatactttccggtatatttataggtgctctagttaatcgccaccgatcactgattgtatagggacttaatgtcaacccaaaattcttccctcgaagtttatccgacccgagcacgcagaaagatcaccacgcaaagctccaagtcacgagtcctgaatgtcaaggcagcaatttccacgtctcccgtattttttcccgcaccggacggagctcagcgccgaagcacgaatgcagtagccgaagcggtcaatttgtcgggaattcaatggaatttgtttctgggcgagagttcggatttacgtagccgatgagcagggagggtgacacggagggggagggggagagaggggggatggtgaggcaggccatggagataccggtgcggtgaggcaggcggtcgacatctcgagaatggagaagtggagcaaggtcgcgttcctgcgccgcgcagcgccgtcaccgcgtctccgtgtcccgtcgcacagtgcaaacaacacaaatgctcggattttatttttgatattatgaattctaactcttttacttacagtacaccgaaaaaaaacacattggatccagagtccagactcttaaaaacattgacgagaaaaaacactcttgattcaatcagatttaagcttaaatcaaaaggaattccgctcaaattaagaggcctggttcttgatttaagcttaaatctgattgaatcaagagtattttttcttatggatatctttatgtgatagcgaggaataggatcaaaaggagaggacacccaagatgaagctaaccgaaaaatatatcaattccgtcgccaatttcgttgacggggacttgaacgcaagtttagaaaagttaacttcttagttttgggacgttttataatgctgtgagaccttttcctttcatgacaatgcttacaccagagcacgaagcctttttaatgatcaatgggcctgttgcatgcaagagatacagctgtgcgaatagacttattagaggttaaatgacacgaaaattacgatggtcacattaaaaaagtctgaaatacactccttactgcgcaatttgcgttgttaggaacgcgctttttcaaatttcccgcgtctgggggcagttttctaacgggaacaattaacggcatctcgcggctatttccggtcaacttaaactgacaacataacctaaacatcggagctcgtgatatcgtgaaatgaaatgtagaaggattgcgttggatatttaaaagttgatcgatttggttaccgcattaagcgtatatggactaccacgttgagatatatagatcacgttgggtttgtaaacaaactgaaggaaaaaataacaacaacaacaacgactcggcatcttccggaaatcaccgagcccgccgttttctcgtttccggtgattagaaaactgcccccagacgcgggaaatttgaaaaagcgcgctcctaacaacgcaaattgcgcagtaaggagtgtatttcagacttttttaatgtgaccatcgtaattttcgtgtcatttaacctctaaaaagtttattcgcgcggctgtatctcttgcatgcaacagacccattaagggatattgacataaaggcagcaagaattgagggagacttgaacgcaaggttagaaaagttaacttgttagtttcgatgtgatataatggttatatcaggacgctgagcttttataattatcagttgagttaaattaaatcactgatcaattggattactgaagtggggagggggcgtgtgacggtattgcaaaatgcattgaaatatgatataaatacaagaatatgaagtctttgtagcttttctgaaaatggacgccttctcttcaatgaaagatcagctaaattgccttgaagacatcagattttcatctatccaatgttaaacaattttcctcgaggtgaagttctcgcaactttcaattcttcccgattttagcaatcggttgaagtccgcatttttagccgtagatgaaaatgtgtagttacattggtgatattttattttccacattgaaatactgaactcagttaaaggaacgacttcatagtataaaacttcaatacccgatcttaaagagaatttgaaggtaccacgaggcaaggagtgccactttgttctccacttaaatccgagatattttctctcgataatcctcaaaatggagaacagtgccaaaataggcaacttaagcttttcatcgataattcttagctgagcgaagtatatcaacagacacattgacgagtcgagactaccagcgaaatgatagttgcaaatccatgacaaatacataataccaagagaaggaagaactcgacaaaaggattgccaaaatcgggaagagccgttagccaatcagagatgacatcattctcgccgtatcgagtaggagcccccacgcaaccctcgctcaaattacggctctattttcctcaccgactcgaacccacctcttacaaaacggagcttgcctattttaacttccggatacaactattcgtgttctacgatcgtgcgtgttgcgtgttcaaaaatatgaaggcgcttcgatatttttacacttcgctcatcggattccgggtttttggcgacaaggccggatgtgcggcgggcggctgggcttcgatcagcgtcgcgacgactcacctgtcgacggccgacgacgtcgcggcgtctcgcggtgtgacgcactcggacccaccgcagggggggggggcggaggggggcttacgttcagttacgtgcggacagcgatcttgggtcctaggtgacgcgtcgcccgtcgcggccggccaatcggggaccgcccacctctctaatggacacggctccggccaatcacaacgcctcctcccaccccgccattcgcactctctctctcccccgcccgcacaacgctcgcccgctgaagtcgagcaatttttgcgaatattcatgaatctgtaggatgactcagggttaagctcgaatatttcaattatctatgggcgtgttactaccaagaaataaatgaatgaatgaaattttcggatataaaaacgctcgaaaattgaggcgagcacgtctgacaggtccgatactgaaatccaccacttaacgtattttcaaatgtccccgttggtactctcttatttttcctctttatcgacagccaggtttgcctaggagaagatgaagaaaacctagcctgaatgtattaaataattgcacggactgtctcgcggatcttttacacggatggctttcgtcgttttaaaagaaactcttttatttaccctctttttctacacgaggagaaaccaaatccatcaaatcgattgaaattatatatgtaaaaactcggagacagtttgcaagattgtttgcatagttagatcaggttttcaaacttacctttcttagaatttccggtgtaacgttaccgacaaggctctcttggacacgggaaagagtgtgcgtgatacgaaccatgcaatttgtgcatttagaattggattctagggttctcaacgctatcattgtcatttttgggtgagtttaccactaaaagtatcttcattttttgtctaaatctttgaaattcttgtaaattctccatggaagaaccactatttctggctcattttatatacaaatacatttgctccattagtttgcctatgcagctaggtgtatttatagatgagctgggtatagcggtgccgaatctcaaaatgtaatacaatttttttaatgaaaatgaaaacatttgcgcggatgttctgtctaaaaagacaaaatggctgccttcttgacagtggcgattttgcaagttggcaacactgtttttcctccatttaaatccattaaaaatatcaatattaagtgaggcaagctacctcagagacatttaaattatgaggaaaaacagtgctaccacctttcaagaatcgccactgcttctagagtcacagcctctctaccaaactttaagagaaaaaaagtctgttcgctaacatcgtggcaatgttactgtttcgctcgctgtgaagttttagatcgttttcacagttaacaacactgtacataatgccacgcgcttgcagcgttatcagtgagagaggcgacgcaaaaaaatgactcccatcaaagcataggcttatttgccggagccggccctcctcagatagaagcctttctaatgggttctaatgcgctccagttttttctgccgccgtcgaccaacttccgaccccgcgactcctcgaatgatcttcgagtgcggtaattaagtgggcgaccataagttatcgcaactaattacaccgcctcgcttgatatcattattaacggatcctaacttcattagcactccgttacgcctttgctgtgaagagcactgcctcgttctgtaacaccaattggacgtatttccaccaaacagacctatgtgcaggtgagaaatatggggtgtgctctagaaagctgcatacgaagtaatgtaaaagtgggcgtgattccttttgaagaattggaaaagcgggattttactttctatcaaacagacctatgaaactatgataactgaatgcgagattcatgagccacgggcatggcaagagcttgttgtggacagggctcatgagttaaagacgaagcggaagcgggacgacggcggttccatctccgttgacgtcactggcgctttattattctcattcacttttacggccagatgagaactaacgagcacaccccatatttctcacctatccacataggtttgtaggtaggtatacgtccaattgatccagctttttattcaactggaggttgtacccccagtcacgactcgactttcgggatgtattgtggggaggaggaaaaagcttttctcataagcattgtccatacgagcgcggtccgaggaacttcgggcgaacttgtttttagaacttcatagaaaaaaagcacgagattgttggatgatatagaaatctccgattaattttggttgtacctccaataaaggaaggtactaacccaaatgttgcggtactaccacaataattggaaatgtccacatcatccaacaatttggggtagtgccacaattttaggagataacccctgaaattttttttcctgtgattgatataacttacccataacttgtctctgaaatcttccagttcgtggaactaattagtgcaaactgcgctcgtgcggacaaggcccatcgctcgtagtgagagcctacttttcttatcgaattatgtcactttaatagtaacagtattttcgataccggtagtcacgcagcgttgtttgcggtgccgaaacattgtcattggggccgagatagtctctgtcacggaagtaacattgtaactacgactagaaaagtaggttgaacctagactccactaaaagtattgtaaaggcaacaaaggcaacgattctttcgaacctttaaaagttcttgatttacatttttctctcttttttttcaaattttcaaatccttaactatgcaatggaggatcaaggcgttcttttccgaacatttttagaaattcctgaacttgtattaaaattcctagcccacctggagtcagagccctcccggtgggaatacacgaatctcagagccgaattttcttcagaatctgtctacaagatacaattctaagttacgccctgctctcagctaaaaatactacgcgcacgccaggaagaatttgtctccgaagcacgcataggccgatccagacacttcgaacaggcggacagaacgggggtccgtccgggttccgggaggctcgacctctccaggaagttttcgaaattttaaaagcatcttaaatgtagtttgagtcaatttcgtcatgaaaaattaccaaatatatgtataagcgtcttctcttctctcctccgtcccttccatatttcttttttttctattacttccctctttttttgggcngggggggggggggggggcgcatccgcctatgaaaacgcgtatccttcagttttaatccatcgtacgtttcacaactcatcgtatgcaattcaaaactgaggaccctaaacgatgaaccttggccgtagacgaaattaacatatcctcagcgttgatctgacggccagagcaaatgtgacgtttcgtgacgtgtatagcaataggcaatatcagcgattaattaggtacctctcctttatcagcctaaacgaggccaccgatttcaatacgtgaaaggaatcgttccaacggcacaataaatccttgattgtagttgtctattgccatttgtcaagtttgaacccaccttcgaatgcgcacctctcgtctcggttgggttcgcgcgattcggctccaccttcttttcccgcccctgttcgtagccaatgacaacacttcagcgcgttggttttatttgcacccttattccatacttagttcttaatttttattgcacactggaaaaaaacacattggatccagagtctagactcttgaaaacattgacaagaaaaaggactcttgattcaatcagatttaagcttaaatcaaaaggaaatccgctcaaattaaggttcttggttcttgatttaagcataaatctgattgaatcaagagtattttttcttgtcggtgtttttaagagtctggactctagatccaatgtgttttttaatccagtgcatcctcttgctttgcaaattaatagtatcaattttcagcaacgagatttccgttttaaagacttaaatacattcagggtatattcaaacacacattaagaaaaggtgatgtttcactaagtcgactttaaggtaatgtcataatgccttttcttgaccaacagctatgcatcctgcattttttcaagaatcaaagggccagcaagtgtattaagtcctttgttatagaaccgattacttgatactatatgcacgtatagtttaccacccaaatcttggttcgtaaggtgacacataatctccctctggcggtctttaaatcaccataaaatcaggaaacacatatatctcgaagcgtcgctaaacgctagtgggttttcttctagatgttgtagccaaaatgaagtagcgtaaaactgagaagttaattcttctaatcttttattatgaagtctcccttaaaatagcctctttttctgtgtgcagatatatatttcagtttattgtacgatagccttagtttttgtatcagcgtcacatgaataataaaattatgacgctaattttcctaaacttgcgtccaagtttccctctgtaatgtctcctcctccgcacaagtatctttcagttggttatcataaaactttagtgtgtgttagggtaagcatcatactacatcgtaaaactgagaagtttactttctaaacttgcgttcaagtctgcctctaccctgcctcctctccgtttgcctctttctcaatttatcatgcgatcaaatcatcgggctctagtataagcctaatactatattgcaaaactaatgaggagttaacttttctaaactcgcgttcaagtccccgccaatattgcttccttctcttagtatgtgttggtcattaatttgcaactatcatctctctagcagttttgactcgtcaacgtttcgtttgatccttcaaccagcagaattttctaaaaatcgaatgagttatacgcacactcataagttcggtgtagtttcgatcccacaaacatagacttactatacatatagtgacttacacgtgcgtttacagttttatgaaaaaaaaaacataaaactccgcagcttgaaacccgttctctacttgacttttttttttcagagtgttgcagaagtgatgaccgcgatctcttcaagtaaaaagaggccctctggaatagagatgttgcatgtgtgaggaatttgcgatttgactgttgattcttgtgtaaaagttcgcgagaaacacgatggtgccactggttttctctgaaatcatctcccaagctcaaagaaagctctcaagttgaggccaaaatggaggggatatcccacgctatcctgagagtccacatctacatcaagacaaactctccatgcaaagatagggagcaaatacattgacagggctgccactttatttgggactccaaaactgaaaacacggcatcactgctaatgtatttgctccctatctttgcatggagagtttgtctcgatgtagatgtggactctcaggatagcgtgggatataccctccattttggcctcaacttgagagctttttttgagcttgggaattgatttcagagaaaaccagtggtaccatcgtgtttctcgcgaacttttacacaagaatcaatagtcaaatcgcaaattcctcatacatgcaacatctccattgttcttttaacaaagtggtgcttttttaaagctccagtctctggtattgtgagaaaatcagtatttcaaataaataggcaagaacattgcgaaacaagctcgacaggccttgaatttccggcatataggttgcgggcatcctccctcgtcagcaccaggtacatgtttttggcccgcggagagactcgttaagtatgatcagtgttgactgttgatagtaattacacaagccgcggtggcatcggtgatcagattagcataactactggggcgaagacagtcataattcgtcgctgatccgacgtaaggacgagactgtattataatatgagccctcccgtcgatttaactccatgttttctagggctcacgttaaaatgaagtgacgtccttacgtcagaggagcaacgtttggtctcaggtgcacggtgtgcacgcaactggtcttcctttcggggtcttcgggaggaacctcatttcttcgtttctttgacgataaggcgtatcttcctcgtcatatgagccctggaaagtactaattctattgattacaggactcattttagaataaattacgcccttacggtttttgcacgatatcccatctcgttaagcgcggggattaatatttcggcggtgtccgtttagtcggtcatttgggcaggtaatggaatttacgaggagtgagccggcgcacaaaggatcgagtcaacaggagaggtcggacaaaatttggaaactttgaaatcttatatttttcgaaaatacagaacaacaaagtttaaaaatggttccattggttccaccgtcagggtgtctacaagtccggaatttccgaaaagtacggaaatagtaatgattttttaagggttgtccggaagtactgcaaaagtgcggaattccgcaagaaggtccggaatttttcattttttcggtcatttttgtcgcaatttgagcgggaaattcaaatttttgaaatttgccaaatttcgtcaattcgaggtactgaaaaagtactgaatttacctattgaggaggtactgaatttcttgggaatgcactgaaaaagtactgttaaagtaccgatttttggcaagcctgttttattagacaccctgatcgtaaaatttcctttcgagaacacccattgaaattgaatttgtcgacaaaatatataaatattaaaatttgaaactgtagccataaatttcatgcccgatctctcctattagctcgatccactgtgcggcggtaatcatctcgggagctctaattaatttaaggtaggagcaggagcagacgtctgtatcttcaaatctacgatgctaagaacaatagtagtaagattattccgcaatgagcctcgaagctcttaaaaacgcgcgttaatcacggctcacgatggaatgattttactgcgctcctctgtaacgccgcagaggtggtcccggtttgggcccggtttcagtggttggctcatttgcacgcggtcgacagactcatctgagacccgccgtaaatcatcttccatcgttcgtcgctcatcattgtcggagtatcggctaattgaccgtggttaaacgtcccgttttggcccgtatgaacgccgccccgcgcattcatctaaattctgtcttgcttcatagacagatcggaggtctttgccaacgacgggaggaatttcatgcagaaggcgatcggctgtttagcggagattcacgtcacgatttgaagcggttccctcctggttttcgatgtgttaatagcctgcttttctcggtaaatcagggacaaaaaccggtctcagtgcataggcggatacagacacctttaagcagaggcagatccagcaatttggcaacaccggattttctccatttaaacctatgctaaataatcgattcttgtcggagcacctggcccctccaagaatcgatatatttccataggctccaatggagagaatgcaatgttgccaatttgctggatccgctaatgcctttaaggggggggggggcagaagaggagggatccgggggctccccccagaaaattttgaatttttacagcgtctaatatgcagtttcagtcaatttcgttatgaatccttcttctttcctatgttcctttctttcttctgccttctctttttcttccttctttttttcgggaaaacggggagggcgcacaccgcacactccctacgccccccttggatccgttaatgtcttgcaggggaaaacggctttagtttaccccctcctccttgaatgcggaaatcgaattccgccgttgtgaagaaccgcaaactgcaagacatcttactcggtcaccagcatcgaaagcaaggctatgcgaaccgaaagcacacagctataccgagccaaagtacgaacgcacgattcggatgaacggttaacccaaccattcagtgaggcctaagtgcattgcctgtggctgatacaatcaaactttctttctcggtgcatgagaaatttttagctgcggttttgaaagtcaccgtacactggaaaaaaaaaaatccggccgtagaggccgtacttacgggctgtatagacgtagcgtccacgtttcgggctcagaagccgaaagttccgggcgtagcacccggaacaatcgaagctacggctctagcacccgggactttcagcctctgagcccggaacagacggtttgtctgaatagcccgcaaatttgttttcagtgtataacactcccattagaaaaagggctttgatgaagaacctttccgaagattctgaaaatcttattgggcgtgctgcatcatgaaacgaatcgacgacgacagagcctgcggccggcgggcggttacgacgatagtgcgagacaccaaaacggtgttaagtgccctccgtgtaattaaatataagttaatttatacctcgtcgagtgttgatcgccgcgccgatttcagggggaaatttaatgtagcttatcggtaattggcaactaatactaggtcactccgtggtcagaggccaggggctttcagcgctcgtcagaccacacatatcgccgccccctgccccctctcctccccctccccccctaagtgccgccatctatgggttctgattcattcattagtttccggtttacattgatgtctcgtaaacgcgcgagtgttgttcggagaaccgacgtcggccgacttgtgcgtaacataacaaccttgctgcggttgaaagttacacagggtcgtgtttcccttcaggtggatatgctccgatctgctgcgcaaaattttgagaggcgtgaaatatcgaaggttcgaaataggttgcggttgccgttgcatcatactatcatgcgaacggatttaatctgagtcaacttaatactttgctcccttttctttcatgattcatttgttatgcgggaagtcggcagtagaatacctgaaaacttcttcaattaaattcctccacataataatgaataaaacctacgatatctgtagcagggtgtcacttcgggcaaatcgtacaagtaaacgtagggagaaaagtggcctagaaggatcataagaattgcctaatgggaggagaggggtcaaaacttcatgaaagtacgaaaaataaccccaattattaaaaatagaccgagattgcccaacttcggtcaactctcacatgcaggaagggcggaaggggcaagggccttactgccctgtttctccccccccccccaatgacattgaatctccacccaccacccttttctcccttatcatcacaggaggctggaactctgcgagaagacaaggatcacgttacgaagaatatttaaggaaagaggccaaaatatgtctacttttataacaacctctccttattccatgagaggttcaatttgacatgaaaaatgacaaatgggtcagttgcgcgattcttgtagatcagctaaaaataataagatctgtctcaagagcaactctctacgcttaatatcaaccgagttatcgcgctttgaaaaattcggtctatgacgtcaatcaccgcggtagtgacacccttggttacttctaccttgtttttatctgtggtttgacgtacatttgcactggtcattcaacgtgagacttcaatgaaagcaagttagaggaaaccaagggtgtcactaccgcggtggatggcgtcaaaaatcctactttttaaagggcgatatctcggttaaaatggaacgtagaaagttgctgtttggacacatcttcttatttttatctaatctacaagaatcaagcatcaaaacacattctgtaaccagcgccactgaccgcggcccattcatcccacgacaaaattaaatattatacatagatgacgtacacaactgagtcatttatcatttttcgaacgatgcaaacgatgcaatgcgtgaagtattcttacagtcttgtaggcgctagtatgctctttgcgtcgactagcgcagcgcgcagcgaccgcagtgtgtttagcgcaatgcgtgaagtattcctgcagtcttgtaggcgctaatatgctttcgcgccgactggcggccgcacaatgtcttgtgggaatagaaacgatgatacaacaatggatttgaaagaaactgtagaaataaaggagtgataatacatttgaagcatgaaagcaaggtggaagaaaccaagggtgtctctcccgcggtatatgacgtcataagccgagttattcaaggcgtgatatctcggttaataatcgacatagaaagttattgttaggataatcttattatttttagctaatctacaagaaacaagcatcaaaacatgattctgtgaccaacgcaactgacccactgcgcccatgcttgacgatccaattattcaaacaaaatgcaacacaagtccaactaagactttgtaatgaccctcttttttttagtgtattttccgaagaaaatacactatttttaatacttcaaactaataaaaaattctactagaaaaagatctcttcttcaatgtaatatgcctatttttccagtaacttgggccaaaattttaatacgcttttcaacgcctccttaacttgagatatgcacccccgccagtcggcgcaaactatattagcgcctacaagcctgcaggaatacttcacgcattgtgctaaacacagtgcgatcgctggtcggcgcaaaaagcatactggcgcctacaggactgtaggaatacttcacgcattgcgccaaacacagtgcggtcgctggtcggcgcaaaaagcataccgattccaggtgccttgaactcccggtacttatttccagtcatgggggtctcaagaaaataatgccttactatcccggcttaactatcagtgatacggtatgagtaaaatagtgaatagaggcaagctagtgccaagtctagagccatgcaggcgcacaggtgccagcgctgtcacttgctttcgcagtatttgtagcgagcattggccgggcaacgtcataacgtcatgcgtcgctcaagacggagcagagagcgggcacccaaacgcaatgcggcgtgcgatgcgcgagtctgacggagcggagcggatagcgactcaaagcaaagtcccctgactccggctccgacttgtgacctctcctccctattcactagctaactaattgctccgccatagatacctcacctccacgccagaccgcaccatgcaatctctccgtgttcttggcacgcgttcggctcgcactccgctcgtccctacgttgggccgcagtcccagttaaacacaaaagtctcaacgtaaaagtccagtgaactagagtccctttatactaagagtcaagacaacacaccctcatggagtcacaaacgagaataaagattacacacattgaacgtttttcgtgatctttgatcggcccattctcaaattccttttttcgttccttctctcattccgtttgttccttgtcgaacccgtaattccttggtccattccagattataatctttgcaattcgtgaaaatgtaatctttattcccgtttgtgacaccgtggaggcctagaatacggtaaccaatcagaaatggattcttattgtcttgactctcagtatgaagggactctacagtcacccgtcaaaatatcaacccagaacaccaatctactacttaccctcctttaaaacctgagttttccttgaaatgaagatttcaaattaggggctaaaagtaggttggaggtggcttcggatgcctttttgggccttaagagttccacagggttaccacaggcagggaatgccgggaaaatcggaaagttccagggaattttaaaaaagtcagggaaaagaaaaccgggaaatgtcagagaaaagacaaaaatgtcaggaaaataatgtaaaatcatgtttatttgctttctggaatgggtttgtggtttcgaacaacaaatgcctggaaactattttcaattacgtcttcttaaccatctgtcatatcttcaatggagatgttgcacgtgtgaggaatgtgcgatttgactattgattcttatgtaaaagtttgcgagaaacacgatggtgccactggttttctctgaaatcatctccaaagctcaaaaatagctctcaccttgaggccaaaatggaggggatatcccacgctatcctgagagtccacctctgcattaaaacaaactctccatgcaaagatagggagcaaatacattgacagggctgccactttatttggggactccaaaactgaaaacacggcaaccctgctattgtacttgctccctatctttgcatggagagtttgttttgatgtagaggtggactctcaggatagtgtgggataacccctccattttggcctcaacttgagagctttttttgagcttgggagatgatttcagagaaaaccagtggcaccatcgtgtttctagcgaacttttacataagaatcaacagtcaaatcgcaaattcctcacacatgcaccatctccattgtcagggaatttcaccaaaatgtgttagggaaatcagggaaatgtcagggaatttcattttccaaattctgtggcaatcctggctccatttctcgacatgcccgtttcttcttccttgtcccggggactgcaagctgtttgctaatcaaccgaacacgctcggtcaatgttcgaaggctgcagtgtgcattgcgcattgaagagagggaggaatcttaagatcacgaagggcctggcagggattcaagggaactcgaaattgcacggcagcagtcggcgatacccgtctaatccatatcgtgtttcaccgcagcgctcttttactctaagagtcccatttctgttgacagttctaaatcgctgtgactacggctcactcgcctggtatttgtgcgctccggagcacccaatctcccgcatctgcatcactttttgaaaggcgctcaacttggaaagtttccacctttgagtatgcgtaagcatccctcatcctaccgaccacatgacctttaagaattgaagcccgtagaattacgtagtctcgtccgtagtacgttgattcgggctcatcgtgccaggtcgagaaccagagcaccatcaaagggagaaagattaaacaactaaaagttagcctgatttacagaaaaaatctttatcgtctattgaaaagtgttttctgaatggtttcagtctataaccttagctttaaaattacaccttgctcagctcaatcggtaaaaaatttaccgagttgcagggatatcattggaacacggaagaattaagagccgtctcatttagcaaaatactatctccgatcaacagccaaaaacaattatgacaggtgcactgagaaaaagctatggtttataaacctattagtggtaaatatggaacacctataatagtcgtaaataaactaatgattctcggtctgtgaaccatactaaggtctctgtacctaattaaggtacagagaccataactaaggtatatgtgctattattatatgtagaggtactactattagtggtgttccatatttacctctaataggtttataagccatagttttttctcagtgtggagccttagcacaaactgtgacaaaaatgaaatttacatagtttaaatgcgaaaattcacaactttagcacgtcgtgtaagcaaatctgggttgtaatatttctaaaatacataatggagtgggttcatctagggactgtcacttatcgatgaccggaaaactcagggaaattggtccagtagaaaggcagaatgagtcgtgacaaatgaaaatttaggtggttatagtaagcttattttaatggcatgatagcgagattgattcttgtttttcactgaccctgtagacacttatcgataatcggaaaaatcctggaaatcaaccgagtagaaaggcacaaaataaagagctgtgacaaatgaaaatttaggtgattgatatgagctcatattaatgaaatgataacgagattaatcctttttgttcaccgaccctgtagggctttccatagctgaaatgggcatgagaccaatgttttgcaggagagcagtgttttacctttcgagataattgcggtagttttgaatcatggcgctggtgatcgctttgttaggtccttcggccaggatcttttttttagctgcgtgtataatgaccctcgtaactcgcccgttgtctcgcgttattattttaaactttaaagacctcgagagtggcatttgaagacagagcttttaaaaatataccactcaatttcccccacgtttgtaattatgttaattcaaattattcattcatattagttttaataatcacgccgtgtgcttaattcacttgcccgtccccctgctagtccccttcaaaaagagaacgtctttcgctgaagacctttacaacccagcatcaatactatcttgttaaggaaaaacgcggtataaacatacctgagttgccgaatttcctcgaaaaaaaaagtgtatttgtgagaatagttttgcatggtttttcttttaatttttagatattttagattaaattgcaaacattagaagaagaattcacattttaaacctgctagtttaaattttaataaagaagtacaaacttataattaaatttacaatttaacccttttttcaggcactttatttattaagatttatgctagccaattctaaaattgcactttagtgttatttatttaactattaataatgattatgaaagtttgagctttttcgactaatgacaaagatatcggtgttttatattttatttttggtgtctggagaggattaattggaacttcttttgaaattcttcaagaattcttcattgaattcttctcatcgtctgaaaaattcgtaaaaaatattcatgattttcccggtaaattcgaaggaaatatggcaacaactgaaggctcatatggcgtttttccttagcatagaatagctacgaggcagcttcatcaaggcactgttttcccgcgccaaagaagaacagcgtatgagcactcaaacgtcgccgaaggtcctcccgttcaaatttattttcgaaaacaagcgtgaatatttttaattgacgtttgcaggtacgccggttttaatttcaaatacaattctaagaaataatgcaaagaacagtgcttctcccatgaaatgttaattttataagaagaaatcttgcaacgttcgattattcatacgcctttttttcttagcgcggcagtggcacatagtcagacaaaaaaccagccgtgtctccgtccaactttgaactttgataccgaattgtggcaggcactggcctacactttctaagtcaagatactagctcgaaggccttgcaccattgcgcaacatttttgcagaggcaatgccaggaggaaaagtaaaataatgctctgcttaaatactttcaacggcggctgggcgttttttctctctcttgtggccgttgcatgcgccaccgtgccagtgatgaatggtgaatgaacgtggcgccgcgccggtggagcgtcatcttgataaaaaccaggtgtaattgcatcggagcaaaattttaggtataaattaaaattccagcgcctcccctccctccccctttggagacttggagctcaataggttagcgtatgaaattactattgaacgcaaaaattaattaatgagttttagtgcggaggtattttgtaatggttatagaattacgcgaaagcggctaaatttgaatctggaaacacaaaatgggatcaagattaacaagtcatcgtaacttacttgaaagtttttaacatattttttggaaatttttaagtaaaaaatgacatccttgcacagtgtgcaaacttgtcgagaggcagaaatattaatttacccgtcaatgtatagtatttatttcgattttgtctcaaaatgaagtcattacctctcgggatgatggtccacggtccaaacgtacgaagagacagacgtcattagccgttatccaaaagtagagtgagaattacacggcgtaataatgcttcgtttttgtcacagcttcatttttgttctctctggacctcaagcgggtcgaaacccgagactaatggtgtcaactacaacttttgggacaaagaagttgaggtattctaagtgcgctatttttaaacattattgattctctggtcaatggtcagcggaactagactctaaagagcctctccaaaaagtggtgttttttagcccctttttttatacccgagttggtcaaccggacagtgctcaaatgaaagcctatggtaaggcaaacttccatgcaaagtttcaacttgaagtgacccctcgtttaggctgtacagcgttgccaattttccagtttcatgtgctaaaatcaaggatattggactattagtccggtgcataagtagactagtacacccgagttggtcaacgggacaaggctcaaacgaaagcttatggtaaggcaaacttccaggaaaagtttcaacttgaagtgacccctcgtttaggctgtacagcgttgccaatttttcatttttatgcgctatactcacgaaatactgaatcatcatggttcaaccggctagtatacccgagttggtcaacgggacaaggctcaaacgaaagcttatggtaaggtaaacttccaggaaaagtttcaacttgaagtgaaacctcgtttaggctgtacagcgttgccaatttttcatttttatgcgctatacttaaggaatactggattcatcatggttgaacagactagtatacccgagttggttaacgagacagggctcaaacgaaagcttatggtaaggcaaacttccaggaaaagtttcaacttgaagtgaaacctcgtttaggctgtacagcgttgccaattttccatttttatgagctaaaatcaaggaattcgggactaatagtccagtgcatcataattaaacagaccagtgcatcggtctacgagctgaatactaccctgagatcgaatagaagcggaactaaaggccatcgtgaacttttcaaagcagtgttgccaatttattattcatttttttaacataaaattagggttttttcgagatttttggcggaaaacgtaccttcatggactataacttcaaagtgaaacttttcctggaagtttgccttaccataaactttcgtgtaggccttgtcccgttgaccaactcgggtatactagtctgttgaaccatgatgaatccagtattccttgagtatagcgcataaaaatgaaaaattggcaacgctgtacagcctaaatgaggtttcacttcaagttgaaacttttcttggaagtttgcctttccataagctttcgtttgagccttgtcccgttgaccaactcgggtatactagcctgttgaaccatgatgattcagtatttcgtgagtatagcgcataaaaatgaaaaattggcaacgctgtacagcctaaacgaggggtcacttcgagttgaaacttttcctggaagtttgccttaccataagctttcgtttgagccctgtgtcgttaaccaactcgggtacactagtctgttcaaccatgatgaatccagtgttccttgagtatagcgcataaaaatgaaaaattggcaacgctgtacagcctaaacgaggtttcacttcaagttgaaacttttcctggaagtttgccttaccataagctttcgttgagccttgtcccgttaaccaactcgggtgtactagtctacttatgcaccggactaatagtccaatatccttgattttaacacatgaaactggaaaattggcaacgctgtacagcctaaacgaggggtcacttcaagttgaaactttgcatggaagtttgccttaccataggctttcatttgagcactgtccggttgaccaactcgggtataaaaaaaaaggggctaaacttggcgaggctctttaccaaccccatgttctctgaaaatattgtcccaatcgttcaattttcagtttctcgtcataaatcaaaacggcgataagacggggtatttttccttcgaatgcacatcgttggagtggatttaacgacgggcaatcagatattgcatagttttctcgcaagtatcctttttcaataaataaatgaaaaaaatgtaaggttatagtggggaatggactttaaatattcttttcaattcagagacaattcacagaaagaatcagggtgttgtgctgctggacctctattaatagaataaaaaaagagaggttatgaggcaacgtattacgcagtaggctgactttggctaaaatccgtccatttatagtaaagtttcattataggttaagatgcctccatcgggttgggctcagcgaggtgcacgggattcggttaccttgtctgagtgtttcacttggcggcatgctcgcgtgcgtgtaatgtgtgaatggaaattaatccggatcttgtgggttgtcaccgcggctgcacgcttaattaaccgagtcgcggcaaaagcgccttgcagttgccgatccgccgtgtgattcgtgtccacatgaccacttcacttgtccctgtccaagatccgcttgccgcttgtccgattctgctccagtggcacgcggcatggtgtctgcgtcatccctcgcgtgggaggcggagtgcccgtgcccatcacgtcaccgattaccgagccacgcgtcaactgggaaccggatgtttgctcaggctcttaaaacggaggaaaactcggtgtcaatgggtcagttggactattctgcaaaacggaactaattgtaagcgtcatagggggaagaagggtgtgcgggttggattggcgcggcggcgggtgcagtctgctgacgagttgattccgtcatatgctcacgatgcttttccatggcgcttgcttccgtttgacagaatgcgctatccgggattctaaaatcctcaaaagaaactgaaaatggcgcttggttccgtttactggaaaaaaaacacattggatctgaaatccagactcttaaaaacatcgacaagaaaaaatactctcgattcaatcagatttaagcttaaatcaagaaccaaacctcttaatttgagcggatttccttttgatttaagcttaaatctgattgaatcaagagtccgttttcttgtcaatgttttcaagagtatggactctagatccagtgtgtctttttttccagtgtttagcagaaatacgtcaattttttttaacagagattcgtgtttttatgatcagttgatgcacgtagttgttgatgcacgggttgcttgatgtagagtagcttcatagtaataatatggagtatagtgacgatgttacaccatgttggcgaaattgaccagtccggagaagggtagcttttttgtcccatttgtgaacaggtcaccggtcaccccgttgtccagtccgggaagtggccgatgttcttgcccattccgttaactgggcagccagtcaaaaggccggaccagactgctcggtcaaaactctgaaaattacgtcaacgggagactggtcgttgattttaaatgaaatccataagctaatcgacgaatgccccccagtgaccgatttctgacgaattatctgcgagatcttgaaagcaagtttaaagtatcataagagtttggcgatgtaattgaattttacagctgattttttgttttgttactcaaaagttattaatacacatttgtgagatctttgaattttgcatatatttttagtatcttggaggtgcgtttttcatgtcaaaaaattggaggcgtcttcgtttcacaaagattagaccgattatgagttggttgtagcgccttgatgcaactattcgtgttctgcggatgtgcgtgttgcatattaaaaaattgaaggaactttcgctattcccacatattcagagatgtacgggactcgtcagttgtagcaaccgaataacagagtgcccatgcaaagaaactaagtatcgcatctcaatccttttactacacaaaaagtgtcgctctctgcttagtcaatgactttcaggcttttatggattatttcctacatacataaaagttgctcctacaacgcactctgacgttctgcgacactcaaacgccgtatgtgcctattttcccagagattgtccggcaactgataacgcaacatctcttcgccaacgcccacgcatgtgtgtggtagagacttgtgcaaagactgtctgatttccaacttttgaaataatttctgaacaaaatttgatggatttgctcgcttagaatttaaatatgaaattcaataaccacctttcaaagtaggggattaaaccgtctgtcgggcaaaaggacctgttttttttatattaccgaacaaaaacaactttggttcatgtggacaggagtctttttattcgttgtactcagccttctcctttaaatttcaattttcttgcgttcatttctattgcattttcaagcaaaatgcgcaccatcgttataatcgcactattaattttcgtattatttgtctttctgtttcaggtgagttaagttttcccagtctacgttaattaaggatggggtgagttatttttgtgtgtgtgaaattttgcgtctgtttttcttctgataccttatcagaagaatccaatcaaccctgtttaaaaaagttgattctgaaagaagaccgttaaatgagtgccttcccactataatccctttgccattaattcgggattcggatgctctcatgaattgtttggttccgcgagatagcgtaaatcatactgtgcaaataattttatctcacggtattctttgttactgttcgaaacatactgtatacttcaaaaccctttgcatgtacggcaagctctaattcacagagaaacaaattttatgctcatccgtctaatcaagtaactgaagaatgcaggaagtgggggaagggcagctaagaattcgtatctcaagtacagtttctacatcgagataccaaaagataacttgacagaaaattattgctaaacgcgttcaactcgatgcattttctcagtatatcctatcgttctttttctccgtgcgtacgtgtgaaagtggtccaaaatatccaagagtacctcataacgaatgagtcgtactaaactgcgaactgtctcgcgagaaaaattgatcccttctcgcggccgaaggagcatcataaaaatttgtttcccgtcaaacgaatgtagatgttcgattcggtcaattttatcggcagtaaaattgaaagcgttcgaccgggagcggcggccgagagcgaagagagcgtccggtcctatatcctataacgagatcataaaactgagtgttaaagcgctattgcttcatcatacgccgtcaaaaaggcacatcatttttgtttcgccatttctcgctggttttattttattcgcgaggtttgatggaataatcagcttaattttcatgctccgcagtcgacagtttaatggtcgaagttcggacgatcatcctctcactatcactcacactatcacacacctcacactatcactcccctcctcttccccctcccctcccctcccttgaccctatgcattcttgagcatccttcgattttgaccctcctaagtagaaaaattcgattcgaattgaatatgatgaggtttaactaggtaatgttaagaaccggacctcgcttcaggtaatcatactttttgtcacactactggaaaaaaagtcgcttgaatctagagaccagactattaaaaacatcgacaagaaaaaatactcttcattcaatcaaatttttgcttaaatcgagaaccaagtttcttagtttaagtagatttccttttgattcaagcaaaaagccgattgaatctagagtatacttgtccttgtcgatgttttcaagagcctggactctagatccaagtgacttttttccagtgcagccttactgactgtgagactcctgatctgaagcaaagacttcggtcagctgttccgaaatttttttctgaaattcggttctattaaatgacaaaaaacttctgttaatcagactataaacttcggttttcattgttgaatcgaagttcactccttacatacaaattgttcttctctgtgtgctattttctccgtgagattagcgcttccgtttggcttacgaactggccctaatttttctatttctcggtcatttctccgccaaattccttgaaaatctcaagatctgacctatgatgtgtctcaaactaacccgttacctccaaagattgttacccctacgatttgcaaaaggcaacagtcaacaatggagaatttggtgaatttcatgtttcagaactgtcaaatgaaactattgagagaactgagccagaaaatatccttggtttcaaaattgaacagtttttttttttatatatgttgttttggctttatatccgggggatactgcggccttggaagggatctaaaattgaacagttattgaaggagatatgataaaataaccaaatctgctaaaatacgtttgtttcaaagggaaatgccgccagatgacgtcacaaggctgcacattttttccattttcagatctattttcctaccccaaatcagataaaaattatgaaaatatactccgaactcagccaattaagcactctcgggcgaggcaatagaaattttccgtgcagatcctccactccatcgatgagcatttttgaagtctcttgtttgtgtgggacggacgcttcactggaaaaaaaaacacattggatctagagttcagactcttaaaaacatcgacaagaaataatactcttgattcaatcggatttttgcttaaatcaagaaccaagcctctcaatttgagcggatttccttttgccttaagcttaaatctgatcgaattaagagtattttttcttgtcaatgttttcaagagtctggactctagatccaatgtgtttttttccagtgttcagtattatcagtgatcactgccagatcatttatttctctattttcatagcatgaacctcggaaacgaaacaacaacaaaacctatctacttcatcgcaatttcaaaatcaaattttcaatctcgaacttcccgatctacacatatatcgttgtacccgtcgtgttggtcgttgcacagcgcaaggtatcggattagaccatatattttattcctcgcagtacgtggttgactgcaagctgcacattaggaaaaaggattgctcagctggaatgagatattgcgatcagtgcaagagtccccacccctcttcccaggcggctgagggttaccaatgacggatgaccaccagtccaatttagaatgtaccaacgacaggagacacaaggcaacttcaagtccgatatgaagaaaaacgttgccgtcctttgaacttactgaatccgcgagccttatttggagcaactttttcggagctttctcgagtttttatcgagcgaaatatggtccttatattttacaatcgtcccagtcgagacaggagttgcgtttctaacgcagaaaccaaacatgacgattctcaaagtggtcagattgattgacagatgacagaggaaagtaactcttgaaaattgaaaaaaatgcaaacaatttacataatcaaactttttatccatattttcttgaagcgcattgaattgaattttttgttttcggcgcggctcgacacaagaggtgaatttctgcgactgcattcggtcaagtttttgacccattgccaacctccgttataacaaaacggaattccctccgagcgtcggtgtgcttaaaatatgtgattttcatgtcggcagcaatgacgaccacatcttaaattcttgacccacctcccggggtgggtcgaaaagtggatggatgcaaacattcgccaaaattcatcaagcaactgacttcagttattgacttcagcagagcgtttacctcattcggtttgcaatcctgccaatctggttgtaaatgtcgaccaaatctacgcgcgaaaattcgcctgaggaaacgataactgtgagaacattagtgagaaacgtatacatgacgtcgtgtatttatttttttttttgccagttcggatgtatgaactgaaaatttggtagcgtgaaccgaacgtcaagtcacacaaatcaaaagtattaaatttcagacacccgtcattatgcttcctgttaatattcattcaaaaaatacctctaatttctatctttcaatcgttcacagaatgaacaacttaagctgagccctaattttcccggtaaaatagcgccaacttgaggcagtagtgctcagacccacagcttgtaaggtccagtcctactgtctgtagttggcgctattacacctacagtgagatatgcttgcttctccgcagcccgtgacaagatatacaataagaacaatttaaacagcgggtgataaggataattttcaaataaataccaccgaaatttttcggctgacgactcagccttccttagttgaataaaaacagtaagacatttaagaatctaaaaacttagtacttggctgtacctttcaaagcgagaaaaatgtatttatgaaaatgttggtgtattatgaaatgattttattctttcataacaacatttttcttgctctgaaaggtacagcaagcactaagtttttagatttttaaattttttaccgtttttatttggctgaggaagactgagttttcagccggaacgttttggtggtatccatgtgaaaattggccttgttacccgctgcttaaattgtcattattgttaacctacaatgttaggtttcagcgctaagttgttttttccgtgttgcgcaactagagaatgaagaaggcaacactggctctgcatcggagcacgaaagcgctgatgtaggtaaagcaccgcgttgaataattccgcgagagtcccggctggtgtccgaccgttcggatctcgtccgcctggatcgtgatgggtatgaagatcggtgcaaggcgcagctttgaggcctttattgagccggcgccagtcccttttcattcccgatccgacaaactgcatccattcgattcctcgtcttgacaagttatttaccttgctcgcgaagacgccgaagacttacgcccgacggaagctccactcctgggagtcgcgtgccagggcgcggcctcatggtgggcctaattaacattaagatcgctcccgagtcgccgttcgtttctaatcgatgggtgtttattgcttgtcctctactctacggattacctgctcacgtcttgggctaattttattcacgcattgggccggctgtccgaaatagagacgaatagagactggcctcttggcgacagcttggggccgtccttatatagaccactagacaaggtacgaatttaagcattctgatacatgtttcttatcaaaaatttcacgtagaacacgatgcgcacaacgaaaattaccgaaagcaactccttacgaagatatttaatgattcttgatgcgtaaattcaaaccgcccgctcatgaaaactcaatgctccacgtgattcacatcgcgcgctgcacgttatcatgacagtatctgcgatataaaaatctggcaacctcaattttgacgcttcggctcagccatagcaaattgcttatagtttgaacatcacatggtgggaaatgaacatcactcgattgaaaagcttgctgaaaccgttgtagtgcgcgatttgactcacgtagagctttgagtttcttgtgagcgggcagttcaaattcctcgtaaccaatgtgaaatcagaacgttaatatcctcgtgaggagttggtttaagtaattttcgttgtgcgcatcgtgttttacgtgaaattttgaccaggaaaaatgtatcagaatgcttaaattcgtaccttgtctagtggtccattggctgttaaacaacgggttgaacaatttatgtaacaaaaggcgaattctcacggtcgaaaatcatacgatttctgaatcggtaatcgctaagtgactttcgatgaatacttcatccaacagagatgagaatggataaatcagtaaaaggaaaaagttgtgcaggtcgtataaacgcgaagagtgggtaagaaagaaaattacgtctgtctcacctgaactaaattatatccgccgatcggaaattcacattcatctgtaaatatgtagtttaatcctcgtgttcttcgatttttggccagggtgatcttgtatccaattcaattccaaaaatcaaacatcaattcgtcaaatgactctcatcgcactatcattactatcagaaacagtatattatagggtggggatgtagataatttcggagatcaacgctatttctcggccgagtaataatgattcatgagcaacttgtcgaacgcataactcgcctgatgatgactgacgaatgtcgggctctgcactttgtcagacgaggttttgcaaattaggttagtacaggtttgttataccaatggctcaacactttggctatcagtcatcatcagacgaatctaagagttcatttccgaacgtaacttccacactttggggaagatagcagtgcggggtctccaaaatacatttgtctgattactatctccgtcttcatctactttctcttctccgtcttctttcctcttctccgtcttctttcctcttctcctttaaagggtgcaagaacttcctgaccacgcgtttggtgcggtcacgtgaaatgaaggatccccgcgaaaacggaaaaaaacgaaggattccccttacaatcaagtccaaacggtggtatcttgtgcaaaatacacgttttagtggtaaaaaggtccgatgtttttggttaaagttctccccccccccctttttataggctttgggaggaagcgatcatgaattttagtcaaaagtgggggaaatattggaactttcggcacccctgtcttctttttttatcctctcagttttctttctcgcctctttctttttcccttcttcatctccctcttcttcatattctccttctctttcttcttcctcctcctctccttttcctcaggcttcctcttctactccctcttcctcctcttcttctactgccgccttttttactaaagccagagtctatttgtctatagcctttatcctcgagccctcaatggtcttccgaggtcttcattcgtttctgtcgattttatcctctcagttttctttcttgtgtctctctcttttcttcccctcttcatctccctcttcttcatattccctttcttctctctcttcttcctcctcctctccttttcctccctcttcctcttctacttcctcttcttctactgctacctttttgaccagagccacagccttgttcgtctatggcctttatcctagagccctcaaaccagtcttcattacttacaatcgatcgactaaagaatccaggaatatgtaaggtgcactgaacgacagaccggtgagaatttgagaagcgaggcgcacgcgacggtcgaacgttgtttcgcaatgcgactctccgcgtcgcgtcgggattgcatcgcatcggcgcggcgcgcggcaaaaaacacgagttctcgcattctcagcttgggcgcctcatttgaatgagcggacacgagtttttttaaccgtcgcaaggatgtttccatgcccgttctcgccatcggtcccaggatttacgaccgtcacattaatcattagtggaacgcagctccaccccttaaacccccccccctttggccataggccgaaagtaagtggatcctgagcagggtagtgtttagcgaagggaagcaagagacttggtcctacaccgaaaacaagagttcggctccaattgaacgccgaagttttcggtcccggaaactttggtgcagctaagtgaactttaacacagccaaccttaaaaatacgtcacgacgaatagtgtagtagggggccctgccccctgaccgctacgcggcccaacccccgggagggcgcctcgcgccctcaggcccgcttcgcgggccctatacgcatatgtataggcaaaaatgttcttccattttaatacaacattttgtgttcgagctgcatcgatttcaaaatttttgacgtaatactcagatttgtaaatgatgatgaatagctggatgtacataatttcacagtccacttactggagaaatttccatttattatgttatttttaaatacttaatttaaaaaaaaaatcggatttcgaccgttaagagttaataatatttggtccgtcccaacgcgacgcagcgcctgccttctcactttgtatctgctgtttatctgctgtaaatattaatagaaattcagcaatcaagtaaatcgaccaatgccacaaatcgaagccggaaaaatgcaggaaaaattgagttaaaccttataccttggaccttgaaccttgaaccctgagcgatgcaccgttcctcaactcttcgaatgaggagcccttcacgagcttttccattgttttattgtttattcgagtcactcaggtagaatcccacaccttgacgtttctagcggaaacgacatatctctcacgctattaacattggacttaagtgacatgagctttaaaagctctacaacattaaaagttcggggtttcataattttttgcacatctacatctactacagatgacatacatataaggagcatccttatcggtccggcagttcgtcagaaatagtgcttccaagattttgcttgtagctgtataatatagagatactaagagatactatgaggctgaaaaaaggtgcgcatccatctatgacggagagactttaacgaaaggttagaaaagtaaaccccgttttccccgcgcgcttcgatttgccgtaacggttacaagtttttatcattaggagttttttttcttgctcacaaagcacatctgctcactggaaaatagctaaaactatcattaactaattactgtaagtgtaataaaaaaaaatagaatcatgtttgcatacgttttgatcagcatcaggggaggaaaaaaaaccctggtaattaaaactcgacgtaactacaaagggaaaccgctgtgcgcaggaaaaacgtggtttactttcctaacctttcggtaaagtctcttcgtcatagatggatgcgccctgttcctcgtccagctaagtaacccaagtaattttagttgtaagtccgagttggctcggcaacttaaaaatgcatggtcaagcgtgaagttatctcagaaaaacgaacgtgccctaagttaaaatcattattaatcattccagcaccgatggaatccttttctattcgcgtactatcattggtcgatcctacgtttcttcgtattactattgttccatgaaaatctctcaaagcctgaaatcaaattagcgctgcttgatattattacaacaggattaaatatgtattccaaaagacaagtgctaaataatttcaactaagtcatttaaatcccatgatttaaagcacaccgagcccagatattattgtgctaaattgatgttttttatgtggaagaaatcagaagccgagtgactgcatcaatagcttttttttaaaaaaaaatcttccaagaatctaaactattacgctgattatttttgtcacagaataaatgtttactaagtcagtttaaattcttccaggaatgcaaccaattactgctgagtattattttctccgaataaatgatcaccgagtcaatatccttcgttattatttccgttaattgttgttcacacgcttctccagatttttaaaatggattgatccgtgtatatcttgcagtctttcttgtgatcgattcttcaacagcctcgcaaatccgtgtcaaacccttgtttatggatttcgaaacgagtattcggacgcattcaaatcagatggaactataatcaaacggaatgagccctatcattgctgaattcctatggatcttagggctcatgtccgaatggacatagttccttttgagttaaatgcgttcgttttaccattgaataatccgaatgtgctccgcggcgaggcgcgggcgaaactgggctagtaataaaatcgtcaaaaaatctgattaatgggtccgcgataaagcagagctctctcctgaccgctgaggttagcggctggccgatggtcaaccactcgaggaggagggagtgtgagaaaatttaccgttgaataaataaaatatatgcgtaacaaggcctcgaaggcgtcttcggtcttgttcgggccacagtacaccttattccacgtagcgccctcaggctcaatgtgagtaacgaaattacacttctcacattcgggtctcaggttttgctctgataggattcaacttagagtcaagcctcggtgcgttgcggcgtccatactgccgtgctgaggaaaaacgccgtatgaacaatatgagcatttgggagttgccaaatttccccggatgaaacaagtgtttttgaggaaactgctggaatgattaataatgattttataacttagggcacgttcatctttctgagataacttcacgcttgaccatgcatttttaagttgccgagccaactcggacttataactaaaactacttgggttaattatctggacgaggaacaaggcgcatccatctatggcgaagagactttaacgaaaggttaggaaagtaaaccacgtttttcctgcgcacagcggtttccctttgtagttacgtcgagttttaattatcagggtttttttcccctcccctgctgatcaaaacgtatgcaaacatgattctatttttttttattacacttactgttaatagttaatgacagttataactattttccagtgagcagatgtgttttgtgagcaagaaaaaaaaaaaccctgatgataaaaacttggaaccgttacggcaaaccgaagcgcgcgggggaaacggggtttacttttctaacctttcgtttaagtctctccgtcatagatggatgcgcaccttttctcaacctcatagtatacactatacacgtcgtaacgtatttttaaggttggctgtgttaaagttcatttagctgcaccaaagtaccctctttttgtgcactcaaagtacactcaaagtgcactcaaagtaccctctttctgtaccctcctcgttggaactctgcttccttcatattttccagtctgaaaacgctataggcccaagcaatcgtgaatgcattgaatttacggttgacgcgcgtgcatccacgcaatcaaaccctagactccctttcgcagcatcccgactccggagaaaggaccgcagcgccacaattaaatcggtcgaagttgaaacaaaacacgtgagacacctaatgagcccagtgctcttcaaggatgtatgtattcgagggctcatcggcgagcgcaattgctaggttttaacaagaacttgttcaattagaccgcaccgagagtaataaatcgatttgaatgacgaccgaggcgcaacgagccattcaaagtatccattcaacggacggctaccgtcatggcgaccgttgccgtcattttgaagaacaccgaatgagcattcaaactttgccaaattatgcggaaaatctgaatgcatggaatgtggtaaataatcgtctgaataaaaaattaaaattgaagttcacaccacaaaaaaaaaaaaaaaaaaaaaaaaaaaaaaactcatttgaggcagtaggtctaaatattcctaactaaacatataattggacttatttctgccaaacggaactaagcgccaatttgagttccttttgaggaatttagaataccggatagcgcgttctgtcaaacggaactaagcgccatggaaaagcattgcgagtataggaacgaatgagcccgacacccggtttcgccgccaatccaagcccccccccctctaccttcctaccccgatggcgcttagttccgtttgacagaaatacgtccaattaaaaatagaattttcatagaaagttgttggtattttctattcaactttcagagactttatccagatcggagttcaatccttagtttcgaacactaactctccttacggataaatattccatcaggggaactttggcaacgtctgaacgtttatatgatgtttggccctagcacattcgtgtaactgtcacttatagcgccgtaagaacgccgtaagagcacttagatgtcgccagatctccccggacaaaatgtttattttcggaaatttatgaatcaaccaaaatcttcatgtacgtatgccaggctaaatcctgagggagatctttcgatagcaaaatttctgagaaaaatcgtagttccagataatttgaattttatcagaagaaacgcagcaacgtttgaatcttcgtttggcatttttcttggtgagctgggtgagtcgtgaatgggagctggaaatgtcccagcgtgactccgaggaagagccgtatatgaagttatcatccgtagggtgaggggcttaggatgaggaggagcgctaggaaaacgagaaatcttaaattaaatatttgaagaattgacaagtgactgcaagttgcagtgtgtagcttctagccatagagtacatagagtcgtaatgtaagtgggagagctggcgccatgttctgctcgacgaattccgagcccggtgtgcgccaagttcgggtcgctttttcgatacattttcgatccaaaatggcggtgtgaaatacgtggtaattcctatctcctttgttgttgttgttgttgttgttgttgtcatcggatggccgggtacccgtgtatcgcaaacaatcgattatgtatcgaaaaagtgacccggcgtcacacaggagtctcggaattcgggacatggaaaatgcctaaaagtggcgccagctctcccacttacattacgactctatgtactctatgcttctagctactgtaatgccggtagttgtagttgaatgaaaagttggcacttttaatttggtttaattatcatacaatttgatagaatacattttgacgaatagagtttcttaatctggggcgttttctgacttgaaatgtacaaaaagcacactgaaaaacaagttagggtcatatggacgtaccggccgttctacgatttcgcggtgccccgaaacgatcgatatccaaaaacttgatttgttcttggataggatataactcatattgaatgacgcagccactaaatcggtgtattgtgagcaatgagctttcttgaatggactgcagggtccatcagaaaacgggcatgtcagattttaagaccgacctatatccaaatgcgatggacacgactgacaacgattagcattcatgacctcggtcttacagcaaccgttcgcttctgcttgtaatcctcggaaaatttctaatttttttgtcattaaggacatgagtgtcgaccgttccctctcctctgatctcaaggcttttcactagcgcacccgcaccgcaccgtcgcatgaatgttcactcgaagagagttcaaggagttccccgcaacgtcggccacatactctgctttctcaatagctcatctcttttccaggacatctcagcggagttgtgcaaaactctggttcattccaaggaagaatgctgtgcgagccttagaatgttgcactggaaaaaaacacattggatctagagtccagactcttaaaaacatcgacaagaaaaagtactcttgattcaatcagaatctagcttaaatcaagaaccaagcctcttaattttagcggatttcgttttgattcaagcaaaaatccgattgaatcaagagtgtttttcctcgtcaatgttttcaagagtccggactctagatccaatgtgttttttttttttttttttttttttttttttttttccagtgtgccaaattttcggcgatgaaatattcatctttgagaaaagtcacggatttccccttaaatcttctggagtattaaagtcgtatctcgtcatgacgtctttgaatgaaattcagagctagaatgttatttccggttgaatttgcatttatagttgcattcattttgagaaatgctgtgccggaaaacgactggccaggacgcgaaaaaatgaacgtttttcccggaaaaacgttattaatcgtattcgatacatcaaactaatagtaaattaagaaagtcaaaataagaaacaatgctcgattgagtagtctgctaaagccgctgtatagtgtgcaatttgactcacgtgtggttttgttttcttgtgaccggacaatccaaagttcactcacgtgtggttttgttttcttgtgaccggacaatccaaagttcccgtatcccaatggacaataaaaaccataatatcttagctagaagttgatttcagtagttttcgttacgcgaatcgtgttctgcgtgaaattctgatgaagaatcatgtatcaaggtgcttaaattcgtaccttgtttaatggtccattcaatccaaaaaagcaaacacacagaactttcttaacttttctcagaggaaactttttatcgggagaaacgaggcaacgttggagtgctcatacggagtcgaaacacaacatgggcctataaagccccattgttcgatgccgcgattatccttacacgagttcgaataatcgcgccaatcacggcggtgcggtcggcgtcaaattcgcatcagcgcctgcaagactgcgtgaatacttcatgcattgcgccaaacagtgcggtcggccttagcgcctactagaccgcgtgaatacttctcccattgcaccaaaagcacagcgagagtattatttgcgataactaaaggataattatgtattttaattgcaacgatgcagaaactcggacaatatttaaacgatgcagcgattctgaaacttgaatcgcataaaattaattttgttttaatattaaaaaaaaaaataataataataaatgggaaaaaaaaacagaaccaacgaacaaaaatacgtcgaaattttttgtgattttattttaaatcattccagaaattttgaaacttctaaaaaactgtgtgtacctttttttagaggaaaaacttgggaactcttcagaaaaactgtgtgtgtagtttttttttaaagaaaaaacagtgttcaaaaattttcaactttcaaaattttcaggccaaaattgtttatcaatttttcttgtatgcaagcattaccgtgagcgatccacacattacaataaattctatattttgatcatattggaatttttttttcagatacacaaatgacacgaaagacgcctccggcctacgcggacggagtatacatgatggccggtcaggatcggccgagccctcggcgcctgagtacaattttcatgaaaggggacgacggtctcgcctccgccaaaaaccgcagcgccatcctcgctttcttcggtaagtcccaacaccccccccccccccccccccccccccgcccccaggccccatcagacaatcatctcacgagagacgtaacttttggaaagtacattggagaaaaaaagtcttttggatccgaagtccagactctttcgaaaatttgactcttgagaaaaaatactctagattctatcggattttgctcgaatcgagaaccaagcctcttggttcgagcaaaaatccgatcacatcaagggtatttttccttgagtctggtttccgaatccaagagactttattctaggaactccggaggacgaagtgtcatccgaagttgaaatttcacctttttgttgcctaataaattttgagttttttctctttctttttttataaccgagcttcaaatagcctaattggagatcttctcgccctttaccttactctgtccacttctactaatttttagcccccctcatccaagatttactggagtgaatctctgtgctgccaacttaaggagtgacgaccaaattttcaaaatcacaatgtcttcaaaattccattaatcaaggtacttaaatgtactgaacgattccgccacaacagctaaattctattcgtaaaaatagagagttgtaagagagcagtaagtccaaattattctgtgaagaagccgtatctcctgacgttgtgtgcaaatttgcacctttttctgtcgtcttttaactataaaattagtttgttttaagtcaagaatttacgaatgcaagtttgcagaaaatagcacgcactgctttcttgtctattatggaaaaaataggtcatttttttcatagtagaagtttaaatcttcagactatttctgatgagcacccaagaatcgccttcaaatttatgagtacgcaacatcttgacagttcgatcgaaatgactcttcctcaagttatagaagttgatcttaatcgcacccaaataaaaaagcggatcaaataaaaaaaaatgaatgaaatattatgtaaacatctcaaattcatcaacttctatgttactacatattaaactatctctgcaagaaaaataagattgtcaataaattttatgaaaagattaattgtcagtgtcaaactatgaaaaatatatgtcaaatagaaatcagttgtagctcaattttgaacttaatctttccaccgatatttttggggtgcatatgtttgataatgttttaaatcttttcagttataaataattgtttaatgcattttttatttttattgactcttgaacttgaaaatggcagaattttcgaaaggtcataggtagactagaggagtgttttttgacccatgtaatgacttcaaaatgtatgagggtttgataatttaggggcatgatgtattctgacataatgtgttttggacggatgtgcgctggtgtggtgtctactaatatgatgttgattttggcaggtcaggtggtgagctccgaagtagtcatggccagtgagagtggttgtccaattgaggtgcatcgcattcaaattgacaagtgcgatgagatgtacgatccagactgcgctggggacaagtccattcccttccaccgtgctggctacgacagcaagactggacagagccccaacaaccctcgccaacaggtacctacaatttctgctctttactctagctgcaaagagttcctcaattatttctgatttttatgaggaaatgttaaaacaaaggtcaatataatcgttcaatttttatagatttaaagggaaatgcgaactttacttattgtgcttccttgttggataaatgttgacataaaaaggtcatgaatagattaaataaatgaataaattgttttccactccttccaaaaaaaaaaaattgaaaaccccataagttaaaaaatgcatgtgacaagttgaatgagcaggtagcacttcgtaattggcatttgcatttcctcctttagcaaccaaagtactccatcaatgtagggagagttgaaatttctatatgtttgattaaaactagaatatcctttgaaatcatagataaaccgagtgacaagttggattgacggaagtttcatctacagcaatagtgaggcatgggtcaacgccatgcgctctttcgtcaatggttccttcaaaactgatccaactggcaagtggcccgttcgaaataccatgcgagtacccctcttcaacaaccctgttccacatgtactccggacactttctccggaacggctcttttgtaagttttcttttgtagtattttttacttcacttcaaagttaaaaaattcagccgtaatattttcagaaacgaggatatatttttgacaaaaccaaaaaattgtacctatatcccaccgcataatgcaaccatctctatctatcaattgaaagcttcttcaatgcatcctatatcccagagccttcagcttttaaaaatatcggagtatgtacctttacacacttcgaaaattcgtctgttattaaaggaaccaatttgcgatttaagatatgacttgaaatctcttaatttttatgtttgtgtttaactttatttttctagtgttgggtgatcctcgaagtaatcaaaatccagccctcctaactttcagtatattattttttcgttggcataatgttattgccaagaaagtgcaggaagcccatcctgagtggtcagatgaagaagtttttcaacgaacaaggaggattgtggtcgcaactctccaggtattagcttcacactgctctttattgtagttaggtgttcaagtagaatagaggtgttagaattttcatttttcaaagatatctatttctaattattagtatccacttaataaaccttacaatacaataatttcataagtgccccataattgatctaaaactgtgacaagaatttttcaaaagttgccttgttttgaggggtagttccaacaggggccagtacctagcttagtttgtaatgctcaccatctaatcatgaaatatctgcctggacgaatgtgccaaatattctccttatttgattaattcatgggtaatggtccaattcattttggacttattaaataaatgagcctattattacaggatttattaggtatctttttgcattctatgtatcaaaggtcttcctcaggatttgatgcttgaattgcataaggacactgtgacatcatgatgacaccaaagtctttgaaactgaggtgatattgcttttaaaaatgaaagggcgtcatgtaaatattctaaaaaaactggaacaactgttcctttgtgaaaaattaaatctgtggggaatatttgaaaaaattgcatgcagtgtataactatgacaaatcacatcatgtttcttaacaaaatgataatattaattacttttcatgtttcagaatatcatagcatatgaatacatcccagccttcacaggtctagaattaccagaatacgagggttacagtatagatgtccatccgggcatcagccatgtttttcagactgctgcttttaggtttggacacacactgattcctccgggtatttatcgaagagattccaagtgcaatttcagaaaaacacccaagggtaaaccagcacttcgactttgctctttttggtgggactcaaatgtaagttaaaaattcttgcatctcagaaataactcatctttcatagcattgtgttgatgtatcctagttttataatcttaacaccaatttcaaaattctgaaggcaagtcttgtgcctcaagagtaggtaagtacaatttaaggaataaatgaatattaaataggactcgaaaaatggcatttcatttattcgtccttaaattagtatattaatgttgtacaaaagatcacgagggcgttgacagtacactggatccgtcttatccgctaggtatttaattttagatttgcctagctaagatagacttttagtagaaccttattatgagtgatccctttctttgcttactttgcaaaggagtggctggaaaagtcataaaaacttggcaaagacaacgtcgaaaatccggaagctgaacgtggttgttatggaagtgagaaggaaaaaaaaaacttttattttcttattttgcaacatatatcatattttaaatttcattcactattttcggaaaacaagtgactttttcgttgaaaatatatcacaagctctactttcttctccttttattaccattctaataattaacaattagagcatcaaaaattccatttgtgttctaggatgcagtctcagagagctctgttgaagaactacttatggggatggcatcacagcttgctgaacgcgaagatactgtactctgctcagatgttcgagatagattattcgggccaaatgatttctctcgcagggaccttggtgcactcaacatcatgcgaggacgagacaatggtcttttagattataatacggtaagtcgcatctgctcctctgtgcaaggattagctgctttatagttcataaagttttgcgctgaggtatttccgactaatggtgcccaatctgctatgatatcataattgattttttttttttcactgaagggtaaaaaaaccatgctcgaaatctgacaaacttgaagctgcaagtaaattttctttctacagtctttttgaagaaaccctacaaatgggaagctatctgtgaggtttttacaactttacattgatacaaagtaaagggtagagggtgctgatgctggagaagaatacgacgaactgtcagaattagaggcgaaagttaggaagaaaaataagagatgttactgagcatgtttggatgtaagtctgagcaatagagttaatgagacaacattctatgatcattcatgatacacaaactttagacccaagtatcattttacaaccaaaatataaaactttacaatgtttgcaatcaagtttttaatataagcattatatatgtatatgctacttataattagctttttatcatagaaaactggtaaaccagaacatcaatgctggtgaaaaagcccaaataattaaaattggtaaaagaagatgaagacttatttacatagagtgctctttgtattttcagattcgaacctacttccaccttccaaaggtaacatcgtggaaagacatcaacccaaccttactcggaaaacatccagaattagtgaaaaaaatgtcagacgcttatggaggctctctagataatgtagacctctacattggtggaatgctagaatcaactgatggtcctggcgagcttttttcatccattatcattgagcaattcacaagacttcgagatgctgataggttttggttcgagaacaaagacaacaagtatgcataattcgatccttctctttgtctttaaatttaacttctctcctcttcaaatttgaaaggatctttgctccatcatgtagttcatagctgcatttgcatcgacaataatctttctctccctggctgcagttattcagtaggaggttttcactgttatgttcgactctaaatttcttggtcatttctcaagcctttaagtaatatttttctttccgatcaaaagtaatagtagatatgtactactacatatttttactatgaccttcttatattatttcagtaatatttttgatgaaaatgtttactcaggtcgagattttagtcactgtctgttcactcagaataggtgtgaacggcaactttaagtattaagtttggttatttaagtttgtttttttttttttttttttttttttttttttttttttactgttagtcttcagctcttatcttgaatctgtttacttttgcagcatcttcacagaagaggagattgctgacctgcgaagagtgacattatgggatgtcattgttaacagcactgatgttccccctgacgcaatccagaaaaatgttttcttctggaacgatggtgatccatgtccacaaccagcacaactgaatgctagccagctggagccatgctcttacctcaagggctatgactattttgaggttggtttatcatcctttcccactctaatggcagaggccgttagaaagcactttttacaagttaaaaaaaactgttgaaatgcacaaatgagtatatactttctgcctttttttatagcaaacggtttttgtgaaaaagttcttgaaaaactttttttgtttttcataaaagttattgaaccttttttaatgtacaatggtattaaaaaactttaaggataattaaacatctttcaaaagttttacaacactatctttaattaaatttcaccttttagaaattttacgtgccaaaaatattttcttttgagcacatcggagatgcagccctgcaagtcctatcaaaattttaaataatgaatgtgggtaatgtatctgtggctaccagtgacctctgtagatgtgacttaattcagcaaaaatcattaaaataatgttttcattcctatccagacaactcgcctccttataggagctttccaccatgaaaaagaaaatttacttactgtacatttaaaaaataattaatttcaatattattatacaatgtgttgatttataaatagtcattactgagttccattgtttttttaatcccagggaagtgaattagctttcacctacgcaattgtcttcttgtgcgttgttccattaatttgcggtgctgcaggatatggagtagtaaagttgcagaaccgtcgacgaagacaactgagaatgaggcaagaagaacttaaatcagggccagtcaaaacctctggcctagccacagtcgataaaatggctgtaagggagtggctccacgcaaaccaccgccgtctggtcaaagttcgcttcggaccagaggccagcctacacacagtggatcgcaaaggagaaaagctgaggtctgtcaacttcaaaaatgctgatactatcaccattgaagaatctctggtaagatatgcaaaatttttgtgatcatgaacattatttaagtttattgggttgaaatccaaatttcatgaacaaagcctcaattgtatgtttcaatgaacaagaacaataatgggtctggttcacgattttagattagccaaaaataataagatctgtcaaaatgcctgttttctacatccagtattatttaagacattatttttcaaaaaacataggtaggtatgatcttttctactggggtagttcataccatggtttcttcaaccttggatttatgaattagtggtaaacacatttgcactagtttatcaatctgaaactcggatggaacccagaaggtaggaaccatggtatgcaccactgtagtggggatgacgtcacgccgtgttttttgaggagcaaaatttttgttaatttatgcatttggctcggaaacttggtacttggacaaatctgaatattttttgctgatctattatcataaatcaacgaaagtgactctatgactagtcagtgacccattatcaacaaacagcgttttcatttttaagggatagttaattttaaaaaattcattgatacatattccgagtataagttctaaaaactcttgaaaaactcaatgaagtacattctaaaattaaggcttgtgccctttactgtgtcattcagcatgccatgcttttatctttctatgctaaattctatgatgatgttagactagaattcaaagactccaagtggaataaactggacagcaattttcaaactcagatcactagtttttacccttaatggatctggaactgaaatcacagacagttgcttacctactcgctttatttctctcttgtactttttcccaaagagacattttacttttctgcttagtgaataagtttcttaaagtattcctgtacttttattttatttttattcatgaaattattgcttttcaggttgatgaaagagggaaacgtaaacgaccaatggtgttgatcagggtgcctcgagaccatgacttagtgctggaatttgattcatctgcagcaagacgcaaattcttatcaaagatggaaggtttcctgaattcacacaaaaagcatctgattgttgttcaggtaaattacacctctactcagtcaattccacacataatttttttttctttcctcctaaatctaatttttaaatgtggatagaaccttgcatacaaagaattgtatgcatattacacatatatttatcagttgttttttttttaggctccacgagagttaatgctggctaaagcagaaacaagagaaaggagacaaaagcgactggaacatttcttcagggaagcatatgccttgacgttcggcttgaaacctggcgaaaagcggaggcgggaagatgaaggtggagaggtcgttatgagaacatctctatctcgagctgagtttgcctctgctttgggcatgaaaccagatgctgtttttgttagaatgatgtttaacattgttgataaagatggtgacggacgaatctcatttcaggtaaaaaatttaatttagttttggcaaaattaaatttgtaataatcttagggtagatcttcctcctacatgaaacattagtgaaaatagaatggaatagtatgaaaatttggatagtggttgcttttaacccctaacagtctgatattgactttcaatatcacaacttttgactcagttcaatatcgcaactttttctagcaggtcatgtgtatttcagactcgcctagatctttaaaaaaatcttttctgtgccttctcatgatgtttagcttgtcattttttaatgataattcaaagaaaaaggtgaagaatcaagcgatagtattaagaaatcctgttgtattgtagttttggtttaagtatttcacacatgctctttcctaagaaatatgctttaattctcttggttgcaggaatttttggatacagttgtcctgttctcacgaggaaaaactgaggacaaattacgaattatctttgacatgtgtgacaatgatagaaatggagtaatagataaaggggagttgtcggaaatgcttcgttcactggttgaaattgccagaacaaccagtttgtcggatcaacatgttacagatttgatagacggcatgttccaggtattttatcttcaattattcatccgttgtctgttatggttgaacctattaagtaaaatcaagtgtaaaattttaaatgaaatggtaaaaaatatttctcaagaggtaggtaacctctggtcttacatcgccatcctctttttaaaacattcaagttcctaaagtgtgtttcgattagagctatttggtattctgtgatgtatttattcgaccctgtagcaacttggcttatgaattaattcattcacccatcttggtgtactaattcccattttattttgtaggatgctggtcttgagagcaaagactttttgacttatgatgatttcaaggaaatgatgagagactataagggagacttcgtggcaataggcttggattgcaaaggagccaaacagaatttcctggacacatctacaaatgttgctaggtaaaacagcacgcctaagaacaagtactaactttattattcttttgatcaggagctgtggatctcagagatcccatcagtttttgagttaagaaatataatatgaggaaaaattagctttcttgatctttcagattcagagatcaaagtatgactatcacccatatatgcccaaaactattttttttaaaattgattttgtatttacttattgttcttgatgttatgcagacagggtaaacacgtgtccaggcacaacaaaaataaaattggcttgcctatatcccagacatgaattttcctgtgttgaacgcatgaaattccctaatttacacgaacactcgaagttaaaacctgcgatgggtcgttaacgacccaatgggcatttatggtttttcctagggctgaggtgttcctaaaagaggtatttgcaccatcggaacaatgttgtaagagcatattggccaaaaaaatgcccaaaaatgtcaaatcacggcggagtcatgatagattacaatttagagcttgaaaaatttggttttcagaggagaaattttcaatctgcagtatgcagaactcaaaattgttagattgaaattaaatttaactaatgtcctaccactgaatgaacaaaacagcgcattacttattttttgaagaagtagtgtttgctttatcaaaaactcaaatcctactttttcaactcagctttacaatatctttaccttgaaaaatttacgctcaagcactgagaccgtttttcctgtaaacattctaaattaaagattaatgcatgatgaggtgtactttttgcgcaaataaagagattaaaatttatccctgctgactcacagaacattaatcaaaattctaaaaactattcttgcagaatgacaagtttccatctggatccatctcttgacgaggaccgcagctggttgaaaaagaactgggattgtctcacaacattccttgaggagaaccgacagaatattttctatctctttatattctacgtcatcaccatttctctcttcgttgaaagatttatcagtgagtaatatcatatttgactctgttataatagttactgaaaaggagggcaatttctccagaattcaaaattatttggaaactcttgatccaacatccatgtaggatcacaactcattttctccgtagaacccctccccaaaagttaaataagtgtcttaattatcaacatttttaattgtcaatagaataaaataaatttatttttggtacgtacagcttcagagtattcaggctctggtacaagtcaaaattagtttgcaaggagaaattgtgagacacacaaatcacaaaaaggcttcatttttttagccctagttttctgatgtgttaattatatgtaaactacttacaccaagatacaaatagtacaagcttcatatgatatatttaatttattaatacaggtctaattttttttagaaatgctaaacatgtcataagtgattcctatgtatgttttagactaagttcaaaagttatgttcatttttctaacatattaaaattattcagaaaaccgagatttgccccccaaagacaagtttttcaagggataattcaattttttggataactggtgcatgattgggtaaaacgaaaggtattctcagatttagcgtccaaaaatgctttggattacctctgcaacatgcttgtaaatttcccctactatttctgatagtgaagtccattaagtcatccggcttaattcgcccaatcatgaaatatatgaaaaggaacaaattgttctgcgtcttcaagaaagggtaaagtttcagcctagatgtctgatgaatcttcacccatctatttttttcctaccaccgaaaatggtcttggtttgttcccattattcatcagttttccgaaaaatcaaattttctccgagagatacattttttcgaaccaaatatttaaattttttaaaatgagatctttgctcactgatctcaaattcgttttattttgattgaaatgtttcattttatgattcatgccttttcagaatattctttcatgtcggaacatacggatctgcgacacataatgggagtagggatcgccatcactcggggctcagcagcctctttgtcgttctgttattgcttgctgctgctgaccatgtcgcgtaacctgctgacaaaactgaaggagttttcaatccagcagtacattcctcttgatgctcacattcagttccacaaggtggctgcgtgtactgccctctttttctcactcttgcacacggttggtcatatagtcaatttttaccatgtctcgaatcaaccgctggagcaccttcaatgcctcacatcagaggtccatttcccctctgactacaaacctggcatcacattctggctgtttcaaaccatcaccggtaagttttgggacacttacgtcccaaaaggttggatagcctcattctcatttgtgtgaaaattgtcccccattgaaaactaaaagaggaaagaaaaaaaatatgagcagcttgttgaggcattgttgaaaaacatgtcaaaagcatagataaaccaattggcactagtcaatacttgccggattaaagtagttgccctttatgttaacctaagtcaccaaaacttctgatttctgttcacttccaataattatattcatactgaaatatgtatatttgtagccaatgtggatttaaggtgatatgttgatattattcgttgagttttccaatgattcaggcagaatttatgatttttcctctagaagacaagtaccaacttgcggcccctacatttgtaatgtaatgactcccggggggagggggggggcgacaggaattggcttttcaatcatggataaaacaattaaagagtcaaaagataaaaaatgtcatcgtgtttaacatctcgggctaatctcccccataatcaagccttgggagcagaaatagcgatatccctaaaacaggcagggaaacatggcagccaaggttagccctattctgacgctgtagcatgttgttagaaaattgtgttacttgaattccagcctaggcatggttttgattacatttgtactaggtattgtttttaattctaagagaatcgggatttttttccatttgtttaaaaatatattatattttccaggaattactggggttctcctttttgttgtcatggtcatcatttttgtgtttgctcaccctacaatccgcaagaaagcttacaagtacttttgggcagcacatagtctttatgtggctctttatgctctcatgttggttcatggtctggcacgaattacaggcccgccaagattctggatgtttttcatcggtcccggtatcgtctttattttagataaggtgagtacctatgtaccttcgatgaaggacaattagatgtagtaagaagtaatgcaccactagacctagctgttacttcatgactgtatcaccaaaaatatgtttgaactttcaaatattttcagaatcgactaatacgtgaaaataattgtatttagtttgtgttagaattggtgaatttaatttctggcttgccataaaaaccgaagtcaaccaagttaaatcagcctttggaaatttatgagtgtttgctatataaatgaattttttccctcttgatttcctaacttcttgggcttttttccaattttccttgtttttgtccttactgtttgctgtttcaagaagtagagaagcattgaactactttgatatttttgttttaaaaaaaagaggttctcagtgttgataaatctagaaaactgtttcctgactataatgagatctgcagtctgcacctttctacaagttttaaaatatcacattcgagctttccaatctaaatacccgcttatttgtgtctttcttgaattttagttaagaagcttttgatcttgaatttaagaagtttttatttactatcccttgattttctgagctttccttgtccattttgtcattaacctagacgtgacaagtattaaatttaagcctaaatgtttttctttctgaaattgacattttttctatttactacttattgctctttccaggtggtgagtctgcggacaaaatacatggctttagatattctagaaacagagctattgccatccgatgtaatcaaaatcaaattctatcggcctccaaacttcaaatacctatcgggccaatgggtgcgcctagcatgcacagcattccgtcaatccgaattccattctttcacgttaacatctgcgcctcacgagaatttcttatcatgccacatcaaagcacaaggaccttggacgtggaaactgaggaactattttgatccttgcaatttcaatgttgaagttgatcaacccaaagtaagtcagcctgagcaatttagtttttaacttaaaatacaagcctaggacagggggtagatagatggaatgacctctttagcctgtagcaagatttaaacaatacctatagtaaaaaatttccccataaagatttttattttaccaatcaacagactctaatgtcaaaaatcaagacttaaaaacactcatagtcccaatatttctgaaattactgctgtttagatttagtgatttaatagatatgattctctgaattttttacaagtcattccaatgtttgttcttctatttaatatttatcaacatacaaagtttgttagtagatggtcattacctaaaacggtcttattaattttagatcttttcttaattttccatgagttacactttttggaagacttctgcgaaatgatcgaacttttatttaaccaatggagctagcagtttataatttagtcatttttttgcataaatttgtttactgtaaattacagtaagattgtattaaatttttccaaatttttacagattcgattagaaggtccatttggtggtgggaaccaagactggtacaaattcgaagtagcagttatggttggtggtggcataggtgtcacaccttacgcctccattctcaatgaccttgtctttgggacgtcaaccaatagatattcaggagtggcttgtaaaaaggtaaaccatccaattgaattgttcatcttctgattgttttttcaccagtaaactcatttactcacctcttttttcatcgtttctggcaatacagataagaagcatagtattttcattgatatcaaccggttaaattattttatattatcattactaatcctgagatgacagtttccgagccttatgtcttgtggttgtggtatatgtctcacaatgtggttgaatgtcagagactttaaagaaagtggtggttctaagatggccattgttaactaaacctttgacatacttccatgaccatttatttttgctacaattttcttgagtagttgcccaaattttctagatttagctgagcagataattatatgtaattttttaataatgtctaagctctttctgtaaaattcaatggttaagtagcctaatatattaaaataagttagatcaacgatgaaaattttgcaacaaaaaaaagttgatctcacattgactctcctaattcagtccattagggatttgcgcaaagtacagaaaaaaactcacagtactgatagagacttttttactatttaccaggtttatttcctgtggatttgcccctctcaccgtcattttgagtggttcatcgatgtactgagggatgtggagaagaaggatgttacgaatgtactggaaatccacatatttattacccaatttttccacaagtttgatctgagaacaacaatgttggtaagtagcgtctggaaaattattcaatttttttttgcttatgctcttagcctcaaaacaagactattatcttgcattaagtaactgatacttgtgaaacacttgataaaatcacctcattaaagatcggaggcaagtgcaattgcaccctcttcatgtccagagcatatcgacggtgaaagtcggcaatcacataactcggtttgtgacgtcgcagacttcctgtcatactttattctttaaacagaaaactactcaacggtaattccttaaaactgccgtgatttttcttctatgtgcgaggaaaattctgcaaaaactgcaagtaatcatgtccatttgttctcctttaaaaaaataacatagttgcggagattttcagacaccgcaaacgagttatgtgattgccgacttgcaccgtcgatatgtattagctgcatgtagtaaaacacatcgttgattgaaacttcgaaaaatcaagttttacccaaattaataaaaacactgtcagttgatatctagaatatctatagtcagatttattacagatccctccatgacaatgaggcagacgataattttaatatttgtatcggccttttctttacctaaatagagtgcttgagaagtccaggatagttttctcggagtgagtcatatttattttttaaatttgcattagacttttttaaatctgggaacccgccaagctagaggtttcaaagtgtgcgtaacaagttagatgtttaatatcttgttcttaaaagtcttcttctaatattttttcctctctttcagtatatttgtgagaaccacttccaaagattatccaaaacaagtatgttcactggtctaaaagcaatcaatcattttggacgtccagacatgtcatctttcctgaaatttgttcagagaaaacatagttatgtaagttcattactttactttttaagtagattcctttttggaaggagaatagtgctttcatgtctaatatcaaattaatttttaatttctttgctgtatgaggtgagagcagcaagtttttatgaagtatatttttataccaatcagtatttttacttaatttttatgattacattgagatcagtacacattaaacaacacaatggatggaaataacacatgggaatctaaaaatgtctcgttgacaagcctctccaagtccaattgtttttataagaatctgctcttattttaaggtcctgaatggcagccccattttgtgagactcggcgagtttgtaaaaattgtagtcagtatttcctagtagaattttcacaagtttaaaaattggaaggtattacgtaccttgacctataactgttggtaaatttaggaaccaatacaatttttcattaatatgtacaatcatgatcccagtcaaatccgagtacaagaaaaaatgtggcttgaatactgtgactaacagtctgtctcctcagtcttgcacttatactcaacagaattcattttcttactttaatcttaatttttggtaccttttagccttgatttcctcgcagagtagtgaagaccctgcactattctaccaccctgttgcacctgtatttttagtcatttgattttcttaatggtgccgctacaagaatctgactgtgaaatttttcttttcaggtaagcaaaattggtgtatttagttgtgggccccgtccactgacaaaaagcatcatgtctgcttgtgaagaagtgaataaaggaagaagactgccatacttcattcaccactttgagaactttggatgattttcaaagaagaaactctttaggtctcaattttttaatttctgcctgccattttgtattatagattgttaatgttgtacattgttaattgtgtttatttgtaaaaaagttacctgtaatttgtttcctatttttggcgccagagcaggttaaaaatgtctggcgacaattctgtaaatggcttcaacaagcgttaaacaaatgttttgtattattaatcaaatactttgtattcatcaggttttccttttttattgttaattagatttcagtggttgtgagtcataattctattttcatttaggctaagaaaactgtcactatcaaaaaaaacatctccttgctaatcagtaagttatgtgtttcacacaattgctttgatgaatgaatttcagagctggcaaaaaaaagtcgaatccgtccaaacgcaaaattttaatgtcttatcagggatcattaaatgctctcgtgtaatgcaggcagtgatgcattttcattttgtaacaaacatggttgtaaatacctctcctgatcgaatatacttcatgtaaaagttaaacttgggagtgaactttctttaaacatacttttattaattgtaattgtattttttttttattgtagttatattacaagtgaaataaaaccattcgaaaatatttcataattcagctctggactcaacaaaactcttgacctgttaataacaatttctgtgagacacataactgatccatcggtaaaatgttcatgcatcaccgaaacattgtttccgaggaatccaggctaaactagagatttattgttgaagtcatcagaaaaaatgaatatcagtatctcatataatttccatctttttagagcagttgtataaccgattggttgctggtcataattgggaatgacagggacattgttgtgctggacagattgtgcatttcagcaaatgtcttactattgggtttccctcagccgtgtcaattttgccaaagctctattcaaacgcaatttaattttactttctcgaagagtcccaaaagtcttcagactggtggtgtcttgactccaaaacccaaataagttacccacattcattgccagcaatcatagttttagagttaccacacaagtttcacatgactttagggacagtctatttagaataagtttagagctctaatcaaacgaggctttgcatctgcatgagagtaccagtgccattgatatttgggctcaagctttccgaagcccttgggacaaagttttccttttttgaagagtgctttgttgccaacctaagtaacgcaacaaaactatgttaccattcagcctagttcttcataccttttgtcactatctatttctttcattaaagatcttacttgagagattgccttttgatttctgctgacctaactctgccataggagcttaattcatgcaactgactccatattttctaagccatgtacagctgtggtgattttattgcactttgaattgaagaaaattgaggctattaatggcttaaataaagctaagtttatttgcaaggatgtaacaattattcagtcttatacctttaattgttgggaaacaattttcattttcagtcaagtagcattcaagatgttaaaaataaatggtcatgaagaaacagtcctggccctaaagcactgtcccaccaggatcgacaatgcgcatgtttcatcatgaattattaaattattttatgattgatgcttttcctctctctttcttttaaaaataggttatttttgttcttttcttctttttctattttttcttttaatgtttctaatattgaatctgtgattttgaccaatggaaacctggacttgaaccagagctaggtttcctgagtatttatttttgagttggtttttttttttttacattacgctccattctaccctttgtttttatgagttcagtcaaaatttaagctagaaatgtgtataaaattgatttaggttaattaaacataatgtcccaaagccatgcatctgagggtgtatcggcttatttatacagcattttaaattatttctatcaccctttttaggtagaaataaactgatgttgattaagtcggtgctaaacagataactctgacgtaggaacttccagtacattaaaaactgtatattttaactgtgtgtaatttttcttcatctttaaatgcggtcacagttaacagtcagtccctatttcaaaaaagccatttttataaaattttcattaaatttaatcattcttgtatttagcttttagaaacacctgtcgccctttattcaaccagaaactttcaaatggaataggcaaagcattgttcctgcgtcaagggaaaaaaaacaaagaaaacacaaagagagagaaacttctgagcaaattgttgtctggaatgctttgaaactgcaaattctgacataattcagaaaaatagaatttatcaaagatacatgtaattttataaattatgaaatcgagattaaaatttaaatttgtaaagtttattgaaaaattgtttatttactttgtatttatctttaactaatatattttctttttcatttgtatgttttctatcaaattatttcctccaggcaaaactttca

SEQ ID NO: 30 - DNA, 8182 bp, Bemisia tabaci
  source 1..8182: mol_type = genomic DNA
aatcagaagccatggttaccggttcacccaaactactggcgaaagaatgtaaaatctgaacagaaagaatctaaaagtagctacaaaatatttaagcgactattggctttacggcgtacgccagtcataaaatatggaaaatttcaaactttcgtcatgagcgaatggacatacatgttcacaaggtaaggactacgtgataataagcaacgtatgaacgatatagagcatacttaatacttgtattgttagttctaatgatttttattgagtattaaatatacaaataaaaaggcaaccgttctgagagatggcgtaaagcacatggttagaacgctcactcatttttcttcttctttttttcataaccctcggcaggctattgtttaattgtcgagtgggcatgtattgccggatttcgttgagacaattgttgattttcaatttgccgctgagcaaagatggaaagtgaaatttccttgcacctcgaaaacctcgaataaatttgaaaaaatttgaggtttgttaattattttttcgggatttctaatattaaacctcaggaagtccagaagcgtttcacatgatcattctgctaatgcggcagtataatgccaccctattaagctgctaaacacaaagagggacacaagggggagtttagagagaaatttagccccaaaatatcgacctttcacgtatgaaattctgaaactgcttctgtaatcattgcaacaaaagtcaaaaaattaaggttattttgtttctctatcagtcagtttacggagtaactctttctgtaattttaggagtacctctagagatgatacagtggctgttatcataaatctaggaactgaaacggaggaagtttgtgctcaaaattttgcagtaggtctgcccgacattatgacagtttacacggcctcgttaaattctggatttgacgttgggtgagttctggtttttgaatatctctttatacctcatctacaggtaatattacgtatgacgtcgctaatttgagtattttttttttttaatattcttgatacctctgactaaaatcaaggatntgggggggggggggctgtgtcatagccgcatacatatgaaccctttggtttttgagaaccgcctttaatttagagggtatgcgacccccaaatgtgggagccccctgtaccctgagcacggtaataattagtggtgactatgacgtgtcccagagtttgtaagtcttacagacaacagccgtaacaactctcaaattttcagcggtatttttagtgatgcatttcatctcaacccaatttttgcgtggacagtgtttattttcccggcttaggctgggaccagtgagtttccttatatgttcgtaggttgagacatctgaaagtacctaggccctcattttcttgatgcgatcatttttatcaatgatgaaagttttgttagctttatcggctcgtaccaccatgacatatttaatgtttatgcttttttaagaaaatatgagttttacgaatgtccttcagaattttgttttttacaaaaaaaaaaaaaaaaaaaaaaaacattctgtaaatgtaagaattgaagatattttcacgcagaaaagaataacttccaactttttatacccaactggttttgattatcatgtatgatttgatacatacagggttatccagaagtctgggaccccccttataacttttgaacaaaaagtgctagagatttgaaatttggggaatgttcctaggtcaaagggaactactttttggcgtacccaaaattttggggggcgccccccctgagaaggggcgccccccctgagggggggcggaccctaacttttttttttcaaatgggaacccctatcttgtgatacatcattcgaaagggcttaaaaaaagaaaacttttggcgcaaaccgattgtcgatacctcaatttttaacaaaatggcggccaaaaaatggcggctcattcaaaagtctgggcctccgctcataactcatgaacacaaaatgctagggattcgaaatttggggaatattcctaggtgaaagtgaactactttttggcgtacccaaaatttcggggggcggaccctaacccttttttttcaaataggaacccctatcttgtgatacatcattcgaaagggcttgaaaaaagaaaacttttggcgctaccgattgtcgatacctcaatttttaacaaaatggcggccaaaaaatggcggaaatgcgtttttaggttatttaccgtcggattcgcttgaaacttggtttccacaggttttcgagcacgaaaaaaacaaccaaaccacggggtgagtcctgggtggttgaaatgacaagtcaggaaacacgattttcaactggctgagagcaccgcacaggaaatctgacacattccgatttaaacttattttcccgccatttttcggccgccatcttggaaaagctcgggtattttgcaaatccaatatcgtatttgttttttcgtgctcgaaaacctgtggaaaccaagtttcaagcgaatccgacggtaaataaccaaaaaacgcatttccgccattttttggccgccattttattaaaaattgaggtatcgacaatcggtttgcgccaaaagttttcttttttcaagccctttcgaatgatgtatcacaagataggggttcctatttgaaaaaaaagggttagggtccgccccccgaaattttgggtacgccaaaaagtagttcactttcacctaggaatattccccaaatttcgaatccctagcattttgtgttcatgagttatgagcggaggcccagacttttgaatgagccgccattttttggccgccattttgttaaaaattgaggtatcgacaatcggtttgcgccaaaagttttctttttttaagccctttcgaatgatgtatcacaagataggggttcccatttggaaaaaaaaagttagggtccgccccccctcagggggggcgccccccaaaattttgggtgcgccaaaaagtagttccctttgacctaggaacattccccaaatttcaaatctctagcattttttgttcaaaagttataaggggggtcccagacttctggataaccctgtatgttgctttagctcttgaaaacagcagacggttatttaaatttaactctagattcgatcgtggttgctggttggtaataattttttctatagatataggtttacacgggtcttttgggtcaattagaacatgggattcaaaacgcaagacgaaaggcagagaaaaggatgtgtttattcgtgcaaaatacagttggaaatatttgtaaaccaatatttacttttctctcgagaaggaacacatttttgacaataatgtattcttaaacgcattatcatgtaaaccgtaaaacttttgacgctatttttcatgaaaaacatttcagaatgtgcatcaccttaggcatgactaagcgagcaaaatgcacacagaacagcttgtattacaatattataccaataactaggggctgcggctgctacgcggccaccgatcactgagaaaagctacacgtaaaaaagcgtagaacaaccatgttcaagttatttcgtagatgaatggattcaaaagccaacgggtgcacgcgaaagaaaacgtatttatctttgattgcaacgttctgcgccactttctatgtcttatttttgaacgccgtttttaaaaagctacccacagtttttttaaagtttccgagaaattttcggcatgatttaaaatgaaatcacaaaaaattttggctcgatattttcgttcgttctgatttctttttattaaaccacaatgaattttatgcaattcaagtttcagagtcgcagcatcgtttaaaaatcgtccgagtttctgagtcgtttccattaagatacatatttaccctttaattgagttaaaacccgggcaggggccgttaacagaaattacgcgtgggcctagttttgtggcgatttgatatagcgtcgcgcaagccaggaaagggagtgcgggtcgagtgtcagtgtcaagtcatcttcacagtgtgatgcgcccttaatccagctagcaccaatgtgcctacacccgttgtcgaatagttatcgcatataactctcgcattgcgtttggtgcaatgcgagaagtattcatgcagacttgtaggcgctaacgttcgttgacgccaactgtactgtttggcgcaacgcatgaagtattcctgcagtctcgcaggcgctgatgtgagtttgacgtcgaccgcaccgtgtttggcgcgattattcgaacccgcgttaggacaatcgcggcatcgaagagtgaagcttaaaaggcccatgttggcccatgttgtgtgtgtttcgacgccgtatgagcactccaacattgcctcgtttctctcgataaaatattttctctgagaaaagttaggaaggttctgtacgttcgcttatttagtttgaatggtccattaaacaaggtatgaatttaagcactcagatacatgattcttcaccagaatttcacgtaaaacacgattcgcgcaacgaaacctcctggaatcaacttctagctaagatattaacgtttatattgtccatgggtcacgggaactttgaattttccggtcacaagaaaaacaaaaccatacgtgagtcaaattgcgcaccacaacggctgtagctcaccactcaaccgagcattgcttctttcccacactgtcatgttcaaagcgtgtacaagtaaagctaagcgtcaagattgaggttgccatattttcatattactgaaactgtcatagtgaagtttggcgtgcaatttaacccaagtaaattatcctttctcccatgagcggaaaggttgaatttattcatgaaaaacgttattaccacggttaggaggtaatctaagctaaggctttcgattcttcgataaccgatcttccaaagcagtggcgtggcgtgaaggatcgattatcgatatatcgccattttaaggtatggtgaggaatcgattactaaggtgttcgctgcgaacgccctgataatcgatcttttttcataggtttgaatggcgaatccatcgatatatcgcaaagcacgccacgccactgccaaaggaagcaaggggcgcgggacccgcagcgcgatccatctcttttcccggacatcgggagaccgggacggtcaagcccggatcgattcggcgcacagtggctcgagtcaaatagagaggcccgacatgaaattttttacgaaaactgcaaaatttgatgtttatttcgtcaaattttaaattttaaggggtgctttttgaatgcaatttcacgaggaaaccattggagccgcttttagaacctcaaggtttcgtataaacagagttataagcatttaaagcttccaaattttgtccgaccactcctgttgactcggtccactgtgcgacgttctccgctgaattttgacccgagggattctgcttacggaattatatattatgatgatgatgatatgatgatatgtcctctttaagtgtaagataaatgcataacaacttttccccgtgcatgcatgaaagctgcttgtttttttttgttttttttttgtttttttttgtttgtttgcctaacaatgtttacagagtagtttaattattttatttcaagtgacagtacttaaaacgactaataacgaatgattaatttatgttgcagggatagaattacgacatcaagggtcaacggaggaaagtgtgctgagttaagacccaaagcaggcttcgtccttagtgtcaattccggcagtagcttgctttgttctgcgtacctaattccccttttagttttttttttttttttgtatacttaaataatatttcataaaccttgcgtattttaggaaaaattaaatattagtaaaaacttttttgaaaaagaaatgaatgtcatacatgacatgtaggacactgctctcccccnatatcacattaatccttattcttataggtttaataagttcaatattagctcacgtggtagtgcagacggcatgacgtgaaaatgatgattacctcttcctacctctttcacgaaaaagctagtgtaagcgaatagtaggaaaatggggttttcagcacattgagtgtgccaaaatatgcgtattaaaagtaggaagtctctatgggagagattcggttcgtttcattttaaaatgcgaatgtggtgcaaatgctgacgaggaagcaaaggttaattggactgagttaagcagaaaggaaccaacccacattttggaaaaaattgagttatgagtggttttgaactcaaccagtgctctactatctatcgccaaaaaatcaaagtttttgttggagcaaattttgcagaaattgaacttgaagtttatcttttacattgagtcttatgcaggagctaaactttaaacctctttttctcggttcgatcccgatgtggcttggttcctttctgtttaactccgtccaattgagagagacgtgattgcaccttggctggtgcttaaaaccatcgtcgcaaagggcctcagttgaacgcaaccttctccatcccctttagatattttcccctttttcctgaaatataaaaaataaaataaaagaaatacgagcatggtcttatcctgcttgaattgatagtaacttcagtgcatacatgttttaagctatgtttcattctacttattccagagtaggtaggtaagtaaagtaagagcctaggaccacttaactgagagaagagagagatgaagacctcagtcttcggtgcgaatgcaattattaggcactgacactgatggtccttacatagagactgcaatattacattttttgagtatgggaagtctctcgtacattggatttatttggagtttgactcaacagttaatcgaaagtaataaatagccttaaacgtaattatgccagatttaagatccacatggcacccctccccctccgtataggtatcccgaattatcccgaaatgggtgatttcactacattaaaaatactcgtctcgccgaaggttatgacagaaaacttacagaaaaataattgaaaagctaggtaataaattgaaaggggtgacttccttgatttggtaaagaaaaatatgaaattttttctttagacgtaaacttataagacttttaagactgaacgtggccttccggttgcgagccgccaactcggattttgaagcaaataagttatacccgacggtaaattagcaatgatgatgaatttgtttgatgtgtttgaacacgagctttgcgcgaattacttttgatcgatttaacttttcttggggagctcagcataatggctagctccaatacactaccctaacgtgaaacctcaaaatataaaggacatacttcattgctgaagaaaatttcaggcacttaatagggtaataaaattagaatataattacccaaaaccgagaccagagtggacgcttctggtgtaaacaaacatattatcaggcaattttggcgcagactctttgacacgtacttcctccgtttcggatccaagattcataacaacagcgattgtttcattctccagagatctgtttagtcaacatgatgatatgatagtaataatttgaaaaaacacgaatttgaaaaacatattcaataatcaggatttgatgcttggtgcgaacacttggaattaacagaaaacttaaattttctattggcaaatattgctcacttctaaataccttgcaatcagaaatagtgacgaagatcttcactttatttgggtaatcattttaataaaaactatgagaaatagtagctctgaaaagtgaaataaaaaactacattttaagcacttatagttgctttctgtgtatgcaaaacttattcatttcaagtattattattactgtatgtacagttttttagaagtggctcattgtgaatgttcacttaattttagggtaggttaagtaacagtcctcgaaacttggttagtttcgagtttacatattgtacagtatattaatcattaacctagttgactatcttaagatatgtatttcatttgtgcttgtatataacaaagatgtgctaaataaatagtaaaaaaaaatg

SEQ ID NO: 31 - DNA, 37478 bp, Bemisia tabaci
  source 1..37478: mol_type = genomic DNA
ctgagacgttcattaaaaaggagtgaaagaggtaaaagcaaacactgagcaatcacaaaaagttattaaattcaagacgatatagtaacaaacactttttacgcttcaaatcctaaaactattccaataaatcctatatactgtaaaagtcagtaaccacacgacagctggaaaacagaaacagaaaacataacctcgaaggcaaaacaacaacaggaagtttgcgcagagccatgcagagcgcagcactgctgtcttgttcgatcatcttcgcgttcggttttatctttatcaacaacttttgaattttgaattttgattcctaaattttagttgtcagctggatgtgtgaaacttcaagtgtatccgtgtgaaaatgccacataaatgatgtaaaacctcacttaatcttcttatttttactcagtaagtattcagatcatcactaagtaggtctcacaaggttagattttccctaactgttatcacttcttgttcaccgctgacatcaaattgaacccagtcattcattttcctcccactttcaccgtacatacatattacaacttccactatgatttctctgaaacattttgattgtaagttgctctaaccagtcgaaactgctatgcctctcatcactgtcctcatcgtcatcactcagtcatcgttcctgctcatcggccgctccaatctgcagactacttgatcacccagcagattcttctgtcaatgttccagaggaaatagacgtatttttcatttgttgccttttttccatcagtaaatttatcacacttaacgttagactgctcgagcaattgttgataaagtgacatgtggcatccagtgaatcagcttatcagtccacatcatgtgagccgagtttgagcttagtaaaccttttgatttgttaagtggttccgatcatccacccttgctttttagtccgtttccatgccataataaaggttacatatcttccaccctccatcaaggacttgaagtttactccctaaagtagacccgtcacttgtccacacaacattgaatctttgatcagccctgaattggtgctgttcaccgagtaaatatatcgattctgatggggttctgatgaaatttcatgtgtttagtatttgttgttggactgtacatacatatgatgaatcatctgtccttcggtgtggactccagggggcatgaatagagcagacgcatcgtaggtatgttgagaccaaagtcaagtattgtttaggtcaccactcatcacttgtgccatgtgagtgcatgtattaacctgatgagtggtgctgattcggaagttatcagagattgacatttgtctcaacatacgatgcgttggctctaagacagcttcaagtacttagaagggatttatctaggtatgaataaagtttgaaaaattcacacatcgcacattgcaatggtacattaggtaagtatgatttttaaaacttcctcaaggatgaattttcttctttttactgactgcgaagttggcaatctaaatttttggtaggtaactgctccaagcagcttaaaatgtattaataagcaaaatattgtgctgtatacacactattagctcatgtgttttaaagtaaaaaattttattttgtttcaggaaaggcagatgtttcatcaatcttaattgcgtgggttttctgcgcttgagcctacaatggctaattttactgtcggcagccgcgttgaagttaccggcaaagatgttcaaggaacagttgcatttattgggccaacatcattctctcaagggaaatgggttggaattatcctagacgagccaaaaggaaaaaacaatggcaccatcaaagggaagcagtattttcaggtcagcacttttgattgattggattccattttgcagtaaggaaccactatttctggctcattttagaaacaacatctatgtctttgatttctctatgcaggaaagtgcttttggagaagagccagaaaaaaggcttattccttattgaagtctccgttctttattgcagaatgtaatccaactgataaatacttaaaatctgatatgtaaagtattatcgtctgctgaaattttctacagtaatgactcaggagttggatgtctaacggcaacttttttgtcctcagaaaatgaagtgattccttcagaaggatcatgaagagagtaatgtatagtttttttttttttttttttttttttttttttttttttttttttttttttttttttctgtcgcaactatcctataaagggaaattttaattctattatgtgcagggttcccagatgttacgacttgtcgtaacattttggaaaaagtgctgatttttgcaaattggtgtgaaatttgtgctgattttgcatgtgtgctgaatttgtgctgatttttgccaattttgtgctgatttttgacaaatatgtgctgatttttcttgggtaaacgtactttcatgaaaataggcggtattttcacgtttttttggtggcagcatggagtggagggagggaaaaagggaaaaatgagagaaaatgggaaaacaaacaaagaggcaagcaaagcaatgaagcattttaagcaagcttttaataagttttatcttaattcagacgattttaacttaattacgtgcttgtgtcacagaattagaataaagtatgcagaagcctaggatcccctctcaaaacttctcatccttaaaatatgagtcctctgagatgcaatatcacgaagtcttttctaatatttcagtatttttctccctcaacgtgtataattaatgctagaatatctttccgaaaaatagtacataatgggaacataattagaacattacatacataaatagaatttacattcatagaattacataattagaagtatgaaataatctcttttttttctctgacggtcttctgcatgaggtgactcattcaaatttagcgccagagacgtgacatcagtgctgctctctgcgcaagcatgacgttcccagccaggttgtgtggttgtgtgcttctgtgctctgtttggcaagtgagacaggcgaaattatcggatctgcagctagttgtgggttttgaccgttaaaatctcagtagttaactttaaattaggttttttcgaggaaaatttcagagtgctgaaaaagtgctgaaatttgatgaggctgagtgctgatttttgaaaattccatctgggaaccctgattatgtgatgcaccggagaccaaggggacttacggcgaatttctgtaactagattcagttgagtttttgacctaccaactacttccttagaaaaaatgaaattccctccgcacactaagtagtgcaacaatgcgcctccatcacttgattttcatgccggcatcaatgatgaccacttctaagattcacagtaaagtgaatggacggaaactttagcctaatctcatcaagcaactgagtttgatccttaacttcggcatagcatttttctctttcggtttgcaaccctgccgatctggttgaaaaagttgatcgaatccttcacggagattcgcctttaagatgcgttagaaaatttttcaggagagcaatgaattgcagttccagacgaaattaccgattttcagtttttgataccaggtaattgatttttatctctctgaaaagcatgtagttaaacttttatgtcataccctctttgcattttcaacaatgtcatacgcaagctttttaagtgaagatactcaaagccggcaacagcgtgaggatccccatcttgactcagctgagcggccgttatgtatgaaatgcacatgtatcaacatccttcccccccattttcaaccaaaaattatgattacttccccttgaagactgaaatttcaatgtaaagtatgctctttaacaaagaaactttcgtttttagtgtcccgacaactatggaatgttcgttcgtcaaatgcaactcactcttatcgatgagagtgggaatcgcattgatatggccaattctggatccacgtctctaacatccctagatgactcgacctcttctaagctgacacctccaggacagcgttccaggttgagcaggtaatatttacagtttttttgcttgtccatagttttgactaataatcaactctggcttcgtttgggaaggaggtagtgttgaatagatagtaaaaatcttacattagcggtgccaattttagatagatgataggctaatgagttagatgtgaccttctaaaactaacccattgtttcatgtggtttttttggtctttttcttcggtcaactatttactttgttacttttaaacataagctataagatgagacatccagatttcctgttcttaataaagtttttgctcattgagggagatttttcaatttcctggattgtaaaatagatccagaaattttgggaatcgcgcataattgtgagaccttgcctcacttttccaaaaattgtgggaacagtaagtcccctgcagttttgaaatcttttgccgcaaaccttgttcccttaattttctcagttcatgatatggactggacaattcggaaattgcaagcacagttgtggaggccctcttcagttttgccaattttaagcaataaatgcgagtttcgtcgcctcaagcggaagagctattttgagctttgcagtcaattttagagaaagtcagctgcacagtttattacaacttattttatttttggaaatcttgaaacttttactttcttacctcttgctcatcagaaccaaccattttttccttttcatatcatctactgaaatattgctgcaattgggtctttaataggcagtttgaacgtcttcgctgggtgaattgtacttcaacattcattttacaaacttgtcatctcataccttcatcaaactgttgaaatatttgattagaattcagcatgatatttttatctcactaacccaccatgagaagttacctcagaatgtattattttcataatttccctcgtctcttcagcccgaaaaatttggagcaaattttcatgacataaccatggaagttactctattcatgttgataaatgagagttaaatccgttttgtaagggaagtctttttcataaaataatcatgaacaagtggttactcatatggatatgtactgttacggagttcattgtttttgagtagttcccagttgaagtagaaagccttcatcaaacttattaggttaaaatttagtgtccataatcatcacaaaatgtatttcagagtaatttaggtaacttttctctccctcagtagaaataattgattttgaatattaaactttcagtgctttctaaatgtcataatattaattatgtatgctgtttaacccttttgtaatgttgacttcatccgcttgctttacattgttgaaacaacatagcaatatccggaagcgtccagagcccactgtgtaagttttcatcttgtctccactatttttttttgcccatattcatgtaaattacacgctgccaagatatgcgcaattctgcttttgttttctaacatcttttgttgcaaagatgaaggaacatgaagcaagtgtttcttcaattttcaaaaatgttatttgcacctgcagtacttgtcatttcaaaatcaatacgttttctgctattagtcctacttaaccaaggatttttttttttttctatttaaatcactgataaaatattctaagcctacaaaatcagaaagagatttaaaaattcagctcctggttacaaagtgacctcagacattatcttacgaattttcctcaattttgttgctaccagcatttgaagatagtctgaaattgtggcagttgtcttttgtgtaagagccacacatgtacctaccattggtttaaaaaaaaaaaaaaaaaaaaaaaaaaaaaaaaggtttgattgtgagttatttcctgtgtgtcaatattcaataaaacgagtgaggaataacttaatcagcctaaaggagacagtaaagtaacaactcaatctgggaactagctgttgcaaaatgtaaaagattaacaaacttaagcaataaaacaatacttggtcttgcccaaatggcaaatcaacaactcacttttgctttcttttgcctggttaaaaaagaggttgttactatctccaaggctttttttatatatataaatacaatctgatcattcatatttgtagcagcttttccttggatctagttgttattctaagtgtgcatcattgattaatgattttattgtagaggacactgtgagattctttatagtaatcaatgatgctacatatcgatttcttccaagggcattatctacatttcatatgtgattgtaggttcaaggcatttctgttaaaactggaattaggaacgcgctgttggggcagatttttcttcttcagaatttaagcgctaaaactgtcagaacatgattttgtgacacaaaactaatgtattagagcccagttcagatgactttgcctcttttgctgtatgtgcaggatagggaattccctctaccgcgcatacagctaaaagggtacttaaaaaagggctgaaaataggtatcaggagatggaccattagacaaggtacgaatttgagcattctgatgtatgttgctccctcaaatttcttcataaaggaccactcacgtaaccataattactggaatcaacttctcaccaatatattaacattttcattttgcagggtttataacagatttgaatttcctgctctcaagaaaaaccagactatgtaaatcaaatagcacactataacggtttggaaggctttttaagcaggctctgttcctcccccattctgtgttgttcaaagtgtggacaacgtccaacagctgagccgaagcaccgagattgagattgccctattttttaaccgcagtgactgatgcagtaatgcttaaaaatatatttcactcaagtagattatggtttttttttttttttttatgagagggatgtttgaatttatgcataaaaaagttgatatcttgatgaggagttacttttgataatttttgttgtacaaatcgttttctgcgtaaaattttaaaagtaaaacatctatcataatgctttaattcgctcctcatatagtggtccattgacagggtgtctacaagtccggaaatagtactgattttttaagggcgatccagaagtactgaaaagtacggaaattccgcaagaaggtctggaatttttttcatttttggtcatttttgtcgcaatttgagcgagaaattcaaaattttgaaatttttcgaaattcgttaaatggaggcactgaaaaagtactgaatttttctgttgagagagtactgaacttcctcgaaatgcactggaaaagaactgatttttggccagcttgttttactagacccccagattgaagaaaatcttgggatcccttaccacttgaacttttagataaatatctggcctcatcactgccatgctaagaaaaaacgcaatgaatgaaaataaatgaaggaatgaacattcgagcgttactgacctgccctggacgaaaagtttatgtttgaggaaaattatgagtatttttttcttcaaacttttttacgatttagattcagttgcgaatataattctctgaaataatataagacgaagaatgatattcacatgtttttctgaagcttcatacagcgtttttctttagcacggtggattagttcattggacctacctaaaagaactggatgcattctgagagttgaagtacataacgatggccaaagtgctaaaccacgtatctccattgctgtgtttcaaaatgtctgcccctattttattgttcgaagaaaaacaagtcaaccatataacttaaaatttcgacgaaatactctgccattaaagaataaaatcgaagacattttcaagaaattaagtgactagttttttaatgaaaaaataattaagtaggacagaaactctgcaacgttgcgaacagagttacgtcgtttcgcacttcggccgttaataaactgtgtggagtgctctaatttgtttctgtcttttctttaccacattatcgctgccactttgtttcggattctactatttcgttccttttatcactctttcgctgatccatactcatgctgtcatagtgttagacggaaatcttcgcctgcgactaaaatcacgatgtcgcaagactcatttttaccttcatcatcatcatcctcatcttcgccttctcccgcattgaggtagcttctcctttgtatgaattcggcgtgtcggtgtcatctatcgtagcatcgtaatcagcattcctatctttcctgcgcttgttgatttgtccgtagttttgtctatctttgtcttgcttgccagtcactctggttccaactttgtaggctaaatcaaaacttgaagagaattgtaacgtcaatttttcttatttacttttttctcttttttttgtgagcaaatgtcatggatacgtctcaggcaaataatcaaatcaggcattttgcctaatgccgaggcaaatagtcaaataatctaacttgcatcaaaattctggtttgtttgctaactttagacaaaataattatttgcttactcaacaaatatttcaccttaaaaatttgcgtcttttacaatgggatctatgataatctctagtcctggatttaaaatttatctcaaagttctctgtatgtcatgaaatattaaatttttcaaattttgacggttagaacatatgaggagtatttggaggaggtgtacattttttcagtcaaggggggaagtaagtaaatttgatgaattctaactttcaaaacattcatactcgtgagatcctcgtaaaaaaacgtactaaacctcatgaatttttcaaaatgtcaccattttcccaggcatttgataaaatgactgaattgactagttgcctgcaatagatacaatgctttggtgtggcgtcaatgattttacacagtttttaagtgctcactgtatattttgtcttgtactcatgacttcaccttattttacacttataactgggtcgcgttaaacagaaaggaaccaagccacatcagctattgccaaatttaattgggcaatttaattttttacatgaaaacggttgtgcggattctcgggcaaatttcagcttttttgcatcataagaggcaaattctttcaaattttcaaaggaatctgcacaaacgttctctcataaaaaatcaaattgcccatttaaatttggcaatagctgatgtggcttggttcctttctgttctacgcggcccaactgtccacaaagaaagggacttcagcaccaaaatgctcggcactgggatcatgatatcactgctcagaaaggtgttctacaaaatattcagcttaaaaaatgtcacatgtattgataaacaaaggacttgcgatcttttaaaatttagtgttaaaaaatacaatcttgaccaaaagcactcgacgttttcaatccactatgtccataattgttgaattgaaatgtcacctctggctctttggatgaatttagttcaactttattacatgttgcctaattttctctcatgttttattttttcaacatgaaactaaactttttatgaatgtcctcaagattatgaagaaattgctcaaaagatttcaagtttcagtgaggcttggttttctgtttaaaaaattaaacatcagagaaaattaggcaacctttgatgttgttagattgattgatcaatccgtccaagtaatatcacctaagtgaattgatctgcttgcctttgattcttttagatacagtggagtgttctttgtctaaagactcatattccaattttttgatcagctgaacaaaaactgcacttctaaaaagttttactgattgagaatatccagtgaatgaaatgcagtccagcaagttgacgcatatttatgtcaatgggtaaagtccaaaacgatgtatcgtatctccattgcagtgttttaaaatctctgttcctactttatctttttgaagaggaacaagtggactatttactgtgtaatttccatgaagtaatctactaatacagaaaaaaaatcaagaaattaagttgactaattttccaaagaaaaaataaagcatgaccgaaagtctgcaacgttgcaaacggagatacgtggttttgcactccagccagcgatgtgcatacctgaaataatggagatgttacatgtgtgaggaatttgcgatttgactactgattctaatgtaaaagttcgcaagaaacacgatggtgccactggttttctctgaaatcaactcccaagctcaaaaaaatctctcaagttgaggccaaaatggaggggatatcccacgctatcctaagagtccacctctacatcaagacaaactctctatgccaagatagggagcaaatacattgacagggctgccactttaattggggactccaaaactgaaaacacggcaaccctgctaatgcatttgctccctatcttagcatggagagtttgtcttgatgtagaggtggactctcaggatagcgtgggatatccccggccattttggcctcaacttgagagctttttttgagcttgggagttgatttcagagaaaaccagtggcaccatcgagtttcttgcgaacttttacgtaagaatcaacagttaagtcgcaaattcctctcacatgcaacatctccattagaagtttgttgtgtgagtttctgtgtgttgtcctgtggttttctgtaatgtaaatgaaacatgaatttcaagaatccaaaccctaatgctttgtttaaatttcagctctcggttatctctggccagttcaaaaagtggctccactccgtcaaggagcaaggaagatgtgcgactatccaccggaaccctcgctgactcttcgttgtcagacaattcaacaccgtctgaggccaaatccgctaatggtcagcaagatccaccatcgcttcagaaacgtgcatccttcgtagaggtgagtcttgtccctctcagctcacgttcagattgccgtcttgtcgaattttgcgtagttttgtctcctgtgctgtcgctcgtaaccgtattgaaagtagtttcctaggatccatgaatttgtctcgaaagtacgagaaatatttaaatttgtatttgcacctgacagaggaaggatttttacctcttagaaatgttttgctgcctggatttttttttttttttgcaacaaaccgttgttttagcctttgtaatgaaacggtgcaacgccatctggcatccataagtaaccataattttttaacttggtgaattttgaagtattaatgattcctgtcctgggcaaagatcatcctgtatagtatacgaatgtttagccggcgccgagtcccttggttgtatgtacattctcttgaaacattagggtacataagaggttttccaagaggaatggcgactagaaaatgggaaggccaaaaatttgctgcatttctgtagtaaagaaactctgaacttaaggtgattcgatggacgccatattttttgtcagaacggcatgcgatatatcgcatcaactggttccattttttcagctacttgtcatttttctcgaatttttagatcgcaattctgtcgtcaggagtctaaagcactcaccaattttaacaaagaaattcaacgtaataaaggcgtggttttttttagagaaaaaatatcgcattcgatactgatatcgaaacagcactcgaatgcaatattttctctctaaaaaaaccatgcctttattacgttgaatttttttgttaaaattggtaggtgagtgctttagtctcctgataacagaattacgatctcaaaattcgagaagaatgacggacgagtagctgaaaaagggaaccaattggtgcgatatatcgcatgccgttttgacacaaaatatggcatccatcgaatcaccttaagtgcagtgtacctccgtgttgctcttacgtgtgatcaatatttgtaagtacgtattaacttgttattttttccttgcgaaatcaactgtttccccttcaaaatgggtccaagtaaaacaaagtcatgtggaatgatttcagcaaaaatcctgttctttttcatctggttcgctactaattacgtatcaccattacttatgtgctgtatttcaaaactcaatctgagtatatttgaaacaccgcatcagtgactaaaccacgaaaccttatatgtctgttcaagacattccagacatcttttgctgttgtgattgttgatgagagaactaatcaatcagtctaatctctttaaaactttcaaggtttttcttctctgtgaaaataccaagcacctgggtcaattcggaaaaataaattagaagtaaagatttcgaaattgcaaggcttgtgaatacagtcacatcgaaattcagagaatcagaaatccaccaaccgaaaaatagagtgctgtatttcctccagttgtagtttcttaaggagtaaatatacttgaactggattgaattttgcattgaagaactgcagtttgtctcattcggtaaatcacccatctacatagggaaagtaacgataaatgtgatgtttctaaaatgagtcagaaatgttagttcctcattgcagaatgcagttcaactgatccgcgcaatcttgatacgaagaggtccagatggtgctgcagtgcataaaatcgtccattacatcgaatgttgtatttcattaataccttgaaagactggtcatcgcccgttatcgtacttttgcaaaactcaagctagtttacacggaacattaccatcctttactctcaaatgcaaacttttctgacaactggcgagtctctggatcttaaggtgattcgatggatgccatgttttatgtcaaaacaaagtgcgatatattgcatcgattggttccatttgttcagctacttgtcattttgtcattttgagatcacaattctgttgtcaggagactaaagaattcagttaccaattttgacaaacaaattcaacgtagtaaaggcgtggttattttagaagaaaaatatcgcattcgatactgatatcgaaactgcccttgaatgcgatattttctctctaaaaaaaccatgcctttattccattgaattcgtttgtccaaattggtatgtgaattctttggtctcctgacaacagaattgcgatctcaaaattcgagaaaaatgacaagtatgtagccgaaaaaatggaactaattgatgtgatatgtttcatgtcgttctgacacaaaatatagcgtctatcaaatcaccttaatatccattttattactacagagcgcccaccacagtgaaagtgccagaaaatgcaagtaactagaaaaaaagtacgcttgcttttttcagaaacgtttaagtttttcatatttccgactattcctcctttcttttcatcctgaaagttccagaaccataaaatcctaattgaaggaagtgttttaccatcaattaatttttttctcttttttctatgagttgaaaaatcttcgaaacagggttgccacagtcagggaaaactgggaaatgtcagggaattttgaaaagtcagggaaaaccgggaaatgccagggaaaatgacgaaaaagtcagggaaaatttgttaaatcaccttcatttgctttctaaaatgggtttgcggttttgaacaacaaatgcctgaaaactattttcaattatgtcttcttaaccatccgtcctatcttcaattgtcagggaattcaaccaaaatgtgtctgggaaatcagggtaatgtcagggaatttcattttcgaaattctgtggcaaccctgacgaaagtgtgagaaaatcggtcaaatgtccgggtcttcatctcatctcgcaaatatattcatttttttgctagccttgataatgtaatggtcaaggtagtttgttgtcagcatgaaggtctcaagttctatcctcggtggtgacaggttttaagaatacaatcccatagaggcatatgctcaaaaaacatttcatatttttgtatttaattcgataaatgatcaaaagtattcgttttacagagagactctaatatactaaccagctgttgatgacttctttggaataaaatgtcatatttcaagctgtcatcaagatattttggtagatatttttaacaaaattcaggaacgtttacagtttttttgacgaaatgagcttattcattttttgatggaccactggacaaggtccaagtttaagcattctgatacattttttttaatcagaatttcacgtaaaacacaattcttgcatcaaaaattacttgaatcaactcctactaagcaattaacattttaattttacattggttactggaaatttgaattgccaggtgacaagaaacgcaatactctacgtgagtcaaatcgcgccttacaacggtttcggcgggcttctttaatcgagtactgtccctttccccaccctttattgttcacagggtaaacgatttgctatagctgagccaaagtgtcatgattgaggttgccatattttcatgccgctgagactgccacaataacgtttagtgtgtaatttgactcacgtaaagcattgagttttcatgagcggaaggttcgaatttttgcgtcaggaaacattaaatatcttggtcagaagttaatttcagtaatttttgttgtgtgaattgttttttacacgaaattttggtcatgaaacatgtatcagaatgcttaactctgtactttatccagtggtccattactaaatgtattctctcattttagactgtatgctttttttactggaaaaaaggggattaccagagtatttttttttttttgttgtgaaggtgactttagatccctacgtgtcacacatttttcatactgtccctcattgtagtagaagaagaagtaaacttgttgattaggatcttgattcttttttgttaaattttaatatattttgtttttagttttgtcaaaccattagccgactaccttgactacctactttattgccttcatcctttgcgatttgaataccctaaaattaagaaggaactcctggtttttgtatttgaacgtttaactcacctctgattttaacttgtgttaatgcgttgtaatttatattttccagcaatctaaaaactctccgtctactccaaagacctccaaactgacctccaaattagttgctcctaaagtgagatcgaaattttcatctcccaaaatacaggctaataccagtagtagctccaatgtcgaacctaattccaattcgcttgaccaacaagtaaagccatatttgtttattttctaacttcgcgccttcatgtttgtcttgcatattaatcctcatctagggctgtctgtgtggatatgtaactacatgtatgtaatccatatttatggctactaacagcacccaagtttgccagcagaaaattgagctcaatcaatttcatcccagctttctctcaatcgagatagagccgtgatatattacccagcacatagtatgcaacccctaaaattttaagtcacatcctcattgaagccgagtgtcaaaattgaaattcccagtccctcttcctcccattttgatagctgaataactttggtttatgtaggcaaataaacttttatcaaacaagtcagaaaatgtaaaggtgggcagagcaggtagttgtctatcagtgagaatcaaatgctgaatttttttaatacctctagtcagatgccttgagtcagagctttcccaattttgaagtgccaactctgtcactatttcaaggtttttgatgtattgaaaacatgtttggaataaattctcttctcacatttctgctatgatctgttggccaaatctaggggagatgatggttgaggatggaatcaaggatcatccaaacaccttgaaatgttgtttctaattcgtgttatattttgcatgtaccaggccattcttttgctcatgtttgatgatatttactcaaagtttatcatttataaatcttgacaccatctgtagcaatgcgggaatcatcagctgtcgatatttttccgtttaaagctatggtaaagaattgattattgaggtatgccctgataatcgatccttttccatcaatttaaatggcagatcaattgattcatcgtaaaacacgctatgtcactaaaaacgattagagggctcctacaatctctagcggaataagtttacccgtttcttgcatttactttcaatgctatctgacgtcagacaatcttttgtctcaaaatcagtttaaatgtacgtgaacttacttggcgtggactcttttgtaaagaggatgtcttgtgaaatcagaggacacttggtaaactgtttaaatcatcgtgttttctgccctgttttgcaatctcttactttattctcgttaattttccgtgtgatatgatgatgcaaataccctaaaaaatatcgtcaatccgtcccttcctttatgaactcccctaagtatttgatctgtaaataggtttgtttcgtaacttacctgtcaaaaatcgttgatagtaattccataactatgcattacatcctctgtaatccacttcttgctgatttagcctcactagcagcagactcatcttgcagtatgcttttatcaactgaatcttttcattcccctgtaccatagtgatcctggttttgtctcctttcatctgtcaattcttgtttcatcaataacgtactttcctccatctaaatgtccgaacccttttgaccattccttgttttttcttcctggagatcaacctttcgttctccctacaaatgaatgcactcttatgaaacatgttcagtagtcaaggtttctggtggtctgaaaaacctgaaaagtcagggaatttatggcgacctgggaaagtcagcatgagtcaggagatgtgtaggaaaattcagggaatttcacaaagagcatttcaacttaataaatttagtgagtgctattagcgatgatacaaacgatttccgagtatcttttttacataatttgaatttttagaagttgaaattacatcaaaagtttaacaaaagtcaaaggaattaaaagaataaatcaaagtgtaagttatttcgaaggtcagggaagagttagggaattccgaaattttggtgttagagaaaagtctagaaataagagaatgaagaaattacggaaatcctggtagttgtgctgaatcatctagttgtgagaagcagtcagtaactaatctgctgattgatcggttaatttattgacaagcctcttataaagaggatcttaaatagaggaaatgacttgcccatgaattaatggagaactttgtagttgaaaactcttgatcgaatgatatggtacgtaatgatttagttatttatatgtagttccatcaaatatcgatggctatagtgtgaaaccacgtttcctcatttgcaacgttgcagaccttctgtcttacttcattgttccatcggaaaactagtcaaggtaatttcttgaaaacttccttgattgttcctctctgtaagcaaaatattctgtataaatttcgaactctaaagttggcttgtttcttggcggaaaaatgaattaagagcggaaagtttgaaaccctgcaatagagatacatggttttgcacttcggtcatcaaaatattggtttccgcgcacgagcagaatctgcaggaagaggatcaaagaattgttttttaatctactcgattttgttgataccggttagccgtaaagaaaaaagttgaaaatggacaacacttctttatactttgtatcaaactcgtttgttttggtgtcctacatttcaagttttctgcttttctttttccaaaaccaaaaaaatcacttttctaatctaatccttagatcataattgctgattgtacattaatgttctttgaaaatttcttatcctttatttggtttctaagtatattttcactgcacacattatcaggggctgggggtcaatcaccccctgaacattggttaaatgtgtcccacagagtctcctctaagtaaaatttaagggccccatttaatactcctgcctttaaggagagtcctttaaaactccattaccttcattgaaagaagctcccaattctttttttggtagctttcccctcccagagcttttaaaacaatctggaaactttaaaagtatctatctcagtctctctctgtgaaagaaccgcaccagtaaatctctttttatatttgttgaacttgatcccaggaccatctacggaccattattttgttatcgttaatgtttttcaaacctgatttcccctcttaccgcattatgtcctaacaaaacctgcgtggaactcctttttggtactctgtattctctaaccaaactttttccttgaggggtttgaaataggtcaactaatcgattaatttttgatttgatatataagaatggatgagacatcatcgcaggacgtattaacatcaaaacctgttcaatgacagggttgccacagtcagggaaaacagggaaatgtcagagaaaattgttgaatcaccctattttgcccccgagaatgcgtttgatgtttcgaacaacaaatattgcataaaaccattttaagtaatgtctttttaaccatcccgcacattgtcaaatggcagggaatattactgaaatgcaccggggaaatcagggaaaagttaggggatctttttttctatattctgtggcaaccttgaataaaatgtcaaatatcatcacaaaactcacttttgctaaattttgtttagttagaccgccgtttcaaggagatttcactgatgatcattagataatgatcagttaaccatattaatttttttgcaaaaattagtttctcaaaaatattttaaatgtgcatttaatttgtttttccagatatttattttctgtcttataatgagcaccatttttgagttgaaagaatgcatagtgaaagtcagtcaataatttatctttataaaataagcttcatctgcagttataacttaaattcattgattttaaacaaataagtgaacatgtgtatgtggaaagattagattttttttctcatttgctagaattttattggtttaaaataagcgcatcatatgattatattttggaagtcttattcatctcatatatgtataaaaaacctttgaaaactatgtaaattcatagttttatacgcagccagttgatttcttgacagatgtccaggttttgaaaactcatattcatgagaaaatttctgcctgcctgcacttttctactacagcaatgaaattatttttatcggattcgaacaccatttgctcttgcgtttaagtacctttagtactttaatctcctttctttcatcgtggaaaaatttcatgaaacctatcctgtcgttattaactcgcttttaagctcattttgtctctgtttatttgtgaattgttttctgtgtatcatactgtgcttgtttgcatttatgtgtacatattgctggccaaatatatgtgaatatttttttgtttgtttttaatgtcggtcatcatacaatctcagttgaccataaccattttaccttctgctctgcatgtgtttgtacagtttttcaccatgttttttattttatgtcttgtatttatgttattttttcggcatgtcatgatcaacgagcccagataacagttaatttaacatggagggtgctctttctctgcccctcactaccaaaagtcactaatttctactaccaaaatcatctaatcaattaactctttctagtatgagattaccatatcttttatagggttttagagtaatgaatgtttcataaataaattggtattaagtaaattagtcttaagtcagccttaaaagtgtcctgcccttttgagagaacttctcttggaataatgcaagagtactaaagattggatttttcgaattttgtactctcttatcattcttgtctttttgaatatttccaaaacattaattctttgccctatctatttttttgtcctgagtttctccaggcttcatgagtcagttgcgctggccacagaagcaagttttgatcattcaagcttccagacaccaaaaaataataagatttgttcaagcaccaaatttctacgtccaatagtaatggacatatcgtccataggaaaacacagggcatgacatcatccacggtggtttcgcacaccttatttcatctgtgttttacttcacgcaaccagtgcagatgtcttcatccttgattgatgaatctaagatggaagaaaccagattatgcattgccgcttgtgaatgatgatgtcataagttgttgtttttgatgagcggtattgttgttaatattggacttaaaaacttagcattttaagagatccattattttttgcttctgattttcagtgcccaacttgaacgacgttcatgtcagtttatttgggagggagaagtttgaattttctgatctcaatgtaaactaagaaggtttatttcttactaaagagttgacttttggcattttcaacattttccaagtgctcttcttaaatttttaataaggaaactgtctcatggtacttgaacttatatctggtctagttgtttgccaattaatttttttgaaaggtaatttgttcaatctgtactttcatctacttttaagcttttcaatgcagtaatgaaagctttatttcagctctcaatccttacttcatttcacagtgtcttgcaaagtttatatcctctgaagattaaaatgtaacttctctaagaaaaatagccattttccaggaacatcctgagtgaaatttgtcatattatgtgttttcgatcatatatccagcaaaatcaatagcttctgagctcataccactatattttaataattttaaaattcaaagtcgtgttccaactttttcctaattattatgatagaatttgaaaatcagtgcatcagtctccgttgcaaagttgtagtgattaattttcctctgtttttgcattcaattgcactcttttcatcagcagtgtagctttctctctcaaagcctaacttctcaaagaactcctgtttctgtggcctgaagaaaaatcagcctttatcatttgctaaggggtttctttttgtttcaaccatagtattaattttttgcccttggttttcagactggttttgtcgaaactttgaaaccgcagttcacaccaggtcaagtcatgcaaccagcctcaggtccggcatcaacgcaaagaccacctccgggtcctgtaatcgacccagcagagcatgaggcactgaaatctcaagtcaaagatttaactgaaaagttagacacaatgagacgtgagtaacccaaatctgctaaaattaaaatatccatgaagcataacttgagtctgtcacagcatcgtatattatcatctaaaaatcttgatagtgtcagaaaagttttgaaagattgcaaacttgttgcaaagccttcagctcacagaataattcatgacaagtctagattttttcgctattatccatacttagggctgaagtcaaaaaatgcgtatatcgaattgtggtgtagaagtctgtaatcatgttttatttctttaaaagaaaacgatgaacaaccaacaattattatcaaaatcttctgtgaatactcttcatacatcttgaaaaaatcacccaaaattgcaagaaaacatttttattagttttccctgaagaaataaaacatacttggagatttttaaatgaaggtatgaatttttccacatttagccattgatgcgatttatttcacaagcttaatgtaattctttatgattccttcattttttattattcaaatctttttttcatcaaaggagtaaggataaatgaagtttcatgcgattataattatttttttctcctcagtgaaacacaaagaaaagacgcaaacactggaagccatgaaaattcagctggaccaagctgctgagtttaaaataaaaattatcgaatcacaagctaatttgaagaaagacatcgaacgcttgaaaaaagagaagcaagatgctctagaggccaaaaatgaattttctgacctagcagaaactttggaaatggcaactctcgacaaagaaatggcagaggagaaggtaagtttctcatgaagtcatattttactttttttcattcctctttttgatccaagtgcatagaaaacatagaataatcattttttttttcttacttgacacaatagttaacttctgataatcgatagcatgctcaataaggaaacgtgctaagagaagaggacatgcgtgtcgcatttttatgctaattctggcaatttcaatagaggaggcctatcgataagggctgtttttgtccccaccctagctgaatttcctcaaacctacgatttttttgctctttggaggtctacattttctaaatttcatcattatttggactacattttgcaatcagggactataaattccggcctggtttaaaaacaacgtatgtgccatttgttttcctatgcacataagtattttttcagatgagccagaatttatagctccaaattgccaaatgtagtccatttggtcattttcggtctcttttctagcctgaaagtggcctaaacgtgaatcgccaggccgattttggcagaaaattcagattttttggcattcaacttcaaacttgcacttcccgccaaaatcggcctcaaggcacatgttttggccgttattaaacccaaaaagataccaaaaatgaccaaatgaggacttatctgtaacaatagcggatgtgaaaaattaccttttcgaaacacgcttaaaaaactgttttgttcacacaaaaatttaaaatatttggctctggcataatgtacagatctcaaagatcacatttcaagtattttctcaaaattttctcgatgccaaaacagttttttgaatgtgtttcgaaaaggtaatttttcacatccactgttgttagagataagtcctcaaataatcatgcattatgttaagtataaaccttcaatgagcgaaaaatcttcaaattgagaaaattcatggtggcctgaaaacggctcttaatgatacccctcttttgggatatattgagaatctgctttcagacggaggtggccaattgagaaaaatttcagggtcctaaatttcttaaatcctgcatgttcaagtaacttctgtgttttctccaccgaattttcttagctatccaattctcagatattttttccttcgctttatgtcctcacaatttcaggggaaactgaaaaaattcagatatcgggaaatttggaattgaaaaattagtgactgcacacctgcgccattactattctctctgtgttataacaatcatttatcttccaattcaatcagtcattacttgttcacaggcagaaacgttagagttagaactggagcaagcaaacgaaaggattgaagagcttacacttgatctagaaataatgaaagccgaacttgaaaaaatcactagcggacacaatgcagaaatcaataatgaagatggagcgcccgtcacaaactatcagctaaaacagttagagcagcaaaatatcaggcttcatgaaactttagtcaggtattcatttccagcccctattcattcaacatagcatttcgacatttgagccaccgcttttcttatttaaaaacttttctgcctcatattgaaagatattgctgactttttaatttgtattaccttatcaaggaagcctctaggaaaacgtaataaattctgataatttttcagaagatttagcaggcaacctgcattgagcgcaaagcggttcaattaagaagatatgttttctcagatggtcaattttactgaaaacgcaagaatacctgtaatccttggtcaattggtgcaactatggtagatgacatgtttttctgcggctttgtttatgactcaatgtttttgcaggatgagagatgtttctgctcatgaaaaacatgaaacacaaaaactgcagaaggagcttgaacaacgaaaagcagaaataaacgatttaagaaaaaatacggacaaattaactgctcgctgtgctgagttggaggagcaagtggctgatctacacgaacaagtacgttgaatatagtgattatccattgttccttctcagaggctatcatgaaatagatacaagaataacatatttaattagctctctcacaacaatatccttggtttctagtttctatctagtttttccaatttttttggcctctccaaaaattagttactttggacatttttgaagagtcctagaactcatttaatgatactaaaacttgatatagttaacacttagagttattaaattcagagacaatgttcatgacttctcgccacactccagttttcaatcagaaaactaatctacataattgctcgaaaactgctgtctgtttcattttttttttttcaaccaaaaaacatttggacaatattaaaataatattaatgatttttgaataatttttaaatcttttgaaataaaaaatttcaaggaacaaattctgctctttttcctttgaaaaaatagagcaggtgctttaaaaactatgcaataaagtgcaattccagagttcagctatcgatgactctctcaggaaacaaacatagaacaagcttttacacaaaaaaaagtttatcttttgcgcctttttttatcagcaggtacatatcaagcactggggacagtttgcaattcatctgctagtaaaaagtacgcaatgttagtgaataatccatttgtcaaaatcttccaacagaaagcatctattaaaaacccttcatcccgttaacaaacatattgatgttatgtcttctgtctgagaaatatactcagtaaaaatatactctgtatatagatagggtatttgtgaaaaaaatctgctaggtcaatttctaaaattatttttgctgcgcatctttttctcgcaaaatagcccgatcaaattcgaatttatgtagaaataccactctttaagaatgtcaagaagtataacatattcaattgtgtttctcttactttgccatcaggtggatgctgctttaggtgcggaagaaatggtagaacaacttagtttacaaaaattagtcctggaggaaaacgttagtaaattgcaagaggaagtatttgatttagaagctctgaaggacatcagcgatcaattgcaagaagacagccgagagcttgaacttcaacttcgtcaagatgtcgacatggcaaatgccacaattagagaggtattcgtccatgtaaccctcatcatttatcatatgtgagagagtaaaacacgatgtgccctgaagaaaaagaatattgagaattctaaacctcagcctaaagattaatgctgcatcatacaatgtaaaaaacacccacgaattccacagattgatcctctgacagcaaatgcaaaatttgaagacatagaatgggaattttaaaaaaagagcctttgagtccattagtactcttgacagccttaaaacgattaattttaaacgcttataacatcagtaatcatgtgaatgaagactacaataagacttcaatttattgaatttcacaggaccgacgaatcgatccgttgtatcgcagaatcttttaagtcgaattgcttgaagcccttgaagggagcggaagatatttctgcagaatcacaatttgacaaattgaggtctcgctgcagttctatttttgctagggctttttctttaattatagattatactttagtcacattcttggttttttctccctttttttttcttctcctttttttctcccttttgtttctcttttttttctcccttttgtcctctagtataaaaaattagttaataatttgtccaaaagcgttcagaaaattatttgaatgaagctaacatgattcagatttgaatcttataacgcaaactaactcattttgaaaaaaagtaggaggggtagtatctggagatgtcaaagagtaaataatacataataacctatgtaacttgatagaagtattttattttgctaagaggacagtgtcctcaacctctggaatcttgaccaagaaaaaataaggtcgtgcaattgaattgtatcaggctcaagtaatacaatttatttttggcaatttatggtttatttcctgtggaatcttgccaaacttgctatgctaccaagatttttttcatttcttaataatgttaagctcatagttattttgcaagaggtttagaatcaattcagcacattttagaatcaacgcatttgctgctaatctccctatgctaaaacttgcgtccacggatgagccagaaatagaggttcatgattccaaaatgtagtccaattgatctttctgccattcatatcaagatcaaatcgaaatataaatttgactagtttcatgtgaattatgtattctatgtttgtaccttgaaatgtcttcaggtccagaaagaaaaagaaaacgccttggagatgctagcagatagggaactaacgatcgtaaaatttagagaactggtcgcaaagctaaaagaacgctgtcaagagctggagcaccaactggacagggaatgcaacagtaaggcagccatgagcctgagcattccagagatgctcgactacaagaagattttcatagactcaaaagcgctcgcacgtgccatagacttagaattaagacgaatggaagtggaaatgttgcagcagcacgtgaatctgctccaggcattcatgccggattctttcatgaaaggcagtggtaagcataaaaatacttaactctcagctttgtggagtgagcctctctaaatcagaacgggtaactcgtcttccgtgttgtgtacgctccttttgcaatggctctaagtcctcttcattttaatggagtgagacttttgatgtatgttatctgcactgttgcgctaagtaaaatcactgtatcagcattcaaatgttgctatttttccgctaggaaaatttttatttgtggaaaaagtcatgaatatttctcccgaaaatttcagactttttacataaagttaaaggaacaaaatcctctgaaaaatcggaagagaaatattcacaaattttaaattaaaatttgaggttttcaaaggaaatttggcaacttctgatggctcatacagcgctcttccttagcttggaaaagtagagttaggaatttttgaatattatactatatcgactgtgtaagtcgccaatcacataactcggtttgcgacgtcgcagacttcctgtcgtactttattttttaaacggaaaactactcaacgacaatgctttaaaactgccgtgattttcttctctgtgcatagaaaattctgcataaacttcaaggggtgatgtcaatttgttctcctttaaaaaaatagcctagaggcggagattttcagcctctgcaaacaaaatatgtaattgcggacttacacttatgtctttaatttcgttttgtgagaattcaacacacattttataactcgcaaggaacttcctttcaggtgatcatgacgctgttcttactttgctgttgattccccggctgatctggaagagtgagatcctaatttctcaaactagggataaattcccagcaatagaaattactactaatcgggaagctctcctcaaagatcactcagctaatcaatttgcagcgcggtcgcgtttttgttcttatctctacttcttacaggtatgttatttttttcacacaaaattgattactgtttggagggggggggggttatcgtaattacgctaaatcattttaccgtttcctttatctccagatttttttctatcagcagtctctagtgtgatttcttatgacacaaaaaattgaagtcattgctaagaaaaataataaaacttgtaaaattgtagaatcaagaaatggaaaatgtcatcctttacgaaagaagtttagtttattcaggatgatttcttatataaactctcttgtagagagaagagatagcacattttaagcgcaagaactgtctcaaataaaaattttgtggaaaaagcaatgataactttctttatttcaactcgtaagtttgttcttcagttttatttagtttgctgagagtcagcttttgcatgttgtttgatagacataaccctacatcattgggtaaaaatgaaattaataaaaaaaaaaaattaaaaaaagttaatattttaagagaggacagcccttttcattgcagttgctcaattgcaaacaaatatttctttaaagtaggagacagactccaactctaattatgtgcacactgtcaaagggaaattagacgcaaatttcaattttcataatttcaattcccaggctgtgctgcggcagttccttaatggactcaacacttgtccaccagatcttctgatgaatatagcaggcatttttccggagttgaacctccatgagaaaactatagatagctatgtagaactattgcgaacgaaccaactagatgaaaatgtcaatactgatgcgttagagaagtgcttgaattacttttgtgccatgcatccagcgtatctgcttcgagccggcgtgaacctacaccaaagctttttgctctcggactatcacaaagcattttcagcggctattgatagcctccgcactgatgctgcaatcatcaatgccgtgatgcaggtatgaaaacctcagaaaaaccttaattttacttgatttgcactaaaattgaatttgtattggcgcttacatgttcttaaatttgaagaatttgcttaatctattccaaagtccttaaaattcaaatcacctggtggtccagaagatcagtcttttttcattttgctgcgaagacttctggagagtccactaatgttgtctctttgtcatacaactgcctattcattaggtacgtagcaaagaataaaggtaaaagagaaggaaactttcctcgtaagactccctttgattgtttttgtaagttcttccatttttttaaaaaatccttgaaaggaatacaacaaattttgatctcattgggattccttgtgacgtccatgaattttctgaagattgcagataggtgtaaggacttatatctgaactttcctagaaatgaattaattttggactttgaaatctaaacaattttaaaaaattttagttatggctttcctaaaatcacggagtcccgaattttcttctcaaaatttcaaagttttgataattattttttttcaaaaaggaaacactgataaaaatttgcacaatcatgccacagagggaagattcattttttcaaaaaccaaaaaatgtgttgtgacaaatggtaaaaccatgccatagagagttacaattttttagctaaaatccagttttcttagttttacatttggtgtaattttgtttctagccggaatctaacccacacgatattgaacttttgtgtcagcacttaatgacatcgtgtgaagtcatgttcacgcacttgaaaccagtccgattactcctgtctagctcacctggtgctgagaaaacagctgattttggtcttggagaaatgttcttgcagaacaccttatctcaagctcaaacacatgcaatgaaagcctcaaaagttatccgtgatatagccagagtttccttttcttcaattgtaatcactggaggtaatgtcgctcatcaatactttccaaatatctttaagtagagtaactattacagtcatatacaagcttatttctatgggactactttgaagaaagacgaggaaaaaatagttccacaaagtgaagtgtatccaagtgttgcttctgtataggtataattgtgtcaaagaaatcaatgattagcttatcgataagcagataatgattgcattggctttctaggtgtatctttcattttctcaatcagatttatccatccttctcctccaatttaatgaattcatctggtatttgttacatcagctgttgacaatgaagtgggaattgacaagaacaaaatgttcgaaattgccacgtcttgttgtgatcgtgtgtttgatgatacattgcaagggccagttgctgtgatcaaaaatgaaatcaatgccctagctgcagatattgccaatttagcgcagacgattcaagagacaattcactcatcatcaaacgttgctcaggcgaaatcgaaatcttccgttgaggtaagaagaaattttttcgtctccgttttggtttcttaaggcgtattttgcatatcattagattccaataaccagaagagattcgtgtattagagaatgaacaagtatgaaaaagcagaaacaagtagtatgggatatcaaagatacaatttcattcttcccgaagcattggaactaatttttgggtgtaaccattatgacttctttccattcctacttcgttgctcaccagacttgttctggtattttcctgctcgcccatctgccaacataaaattgatatgttaaaagtgattgaatggattgccactttacaggatgtaatcgccctgcttaccatgatttgttcatagaaagacacaaatgcatcgttttacaactgcaaagtatcaaattaaatttgctagtggtgagctctgtttcatctgagcgttcttttatcccaactggccagccaccacaagaggtcaaataatctggagtatagcgtacttaagtaccctgtgaacaattgaaacaaattaaaacaacaatcaaaaaacaattgagtataagagtttgcgaaatttttttgtttttcatatcatttaggttaagttttctcatatctctcttaccccaagcaaacccaattgccaccagctgagggaaaagtgccggcagacaaggtagatttaaaaatgcaaaaaatggatttcgcaaactatgctcaaaagagtggatttttaaaaacattgtatatacttatcatgatttttgtgggattttaccaccggtaagtcagtcagatacatttcttgcgtgcaacaggtctgttcctttatctaacaagggcttattattcatgttatatttcttgatgtgttttctgcagattacgccaccaattatggttcgtgccaagcagaccaaagaagaattaggaaacaccaaagttcttcgaacgaagatcgaggctttggatgctgacattcgtgagttaaaaatgactttgagagccaaacaagaagaaatcggggagttgtccgtgaggaaagagttagcagagaagaaacttgcaaatgctgtcagagacaatgaattcaatactcaaaaattacaagttagtatttttttctcttgttaaaattacaaagacttctatctacttttctgtgtgactgatatgaatagatttttaaggaatagttgaatttagattaaatgttcatcgtaattgcagatgactttgagattgcgaagtttaaaattattacaaaaacatttttttgtggaagattgattttaaaaaattaaaatttgggggaactcctttttttattcaaagattttacacgattttgcttctgtggcttttattatattctgagctatgatttatgctgtctgggagaaaatgtgatggaaaaaaaaactgaagtcttatcttcattttactgtcgagtttgcataattttttattattgatctattaaaaatttgacaaaaagaatctcaagtacaaggaaacagaatctatacaaaagcaagaaggaaaaaagaacgacacatatttcaaaatgttgggtgtatcaaaacactcattatctttcctcaagttcgctaaaaacagactgaactgttgtgaaaactgtaatgcaagtctcggaaaacaactaagctcttttataagaaacagtaagcccacaactgctgcaaaaatgattcaaagggttgcaagacatcgccaaatttgtgggattgagctccaaacattgttaacagtatatatctgtgtgtttggtgaaaatggttatcttgaaataatgagaatttggacttgtttgccaaagttattatgcagaatttgttttttttttcttctttcttttttttctttttttttgttgaagaagtccaactgaaataatgtgagagaaaattggataaaaataaagaaggtgcaaaaattatgtgtagtaacccagcatgagtttgaatcatttatcattcaattctttcagcggaaattagaagaagctcagaatcagctcaaacgaaaagagaaggagtttgaagagacaatggatcatttgcaatctgacattgacaacctggaagcagaaaaaggagaactgaaggacaaactgaagaactactccaaaaaagcatttatcgagggtgttgcagccaagacagtaggcggttcgttaacatcacctgttcacagtggagggcctgtccaagtgatcgagtcaccactgcttcttgacgagatcgataacttacggagagccctggatgtggtgcaaatggagaaagggcagctagaagcgcagtattgccagaagattctggatggcatgaaaccgttgatcatcccgcagaaaccaacaaaaacgaaattagacgaactcaaaattaaagccaaaaatctacgccaggtatttttatttgtaactacagcaaaatgtttacccattcattgtcctgcattttataggattttttcattttcttagttggatatttgattgtttttttttctccttttacttttaagtcctaggtgtctacaggactagaaaaccaagaatcatcaggagaaaatcagggaattttatcaacagacttgaattttgaacaattttgaatcttgaaatctgatgaaacatcgcatgatatggagagacaagacatttcgatcattttaatctgtgaaaatctgaaagagtcagaaatgttttcccccagaacactaaacatctcgacagttatcttaatttgattaatatcaattgcttcacctctcttacattagctaaatagttcacttcatgcctagaatttaatttcctgcaagaatagcgaaagtggtcctttttttgaaaaaattactgtgcttccttggcatttagttccaattcagatttttacagctcattcttctgaagagaatttgctctatgacaaatcccttgaccaaaccctgtttgcagcacaggcatcaaaatgcacagctttgataactattaacgtaattttctcaaaccttgaaaacttggcattcactgtatgtacgtatgtggtttcaggtgctatcacatgactagcgctgccgcttgtataaatgatgtcatcagcgccatatttgatgaaaacaatgttatctgatttaaaacattttatatttctgttgaatttgtatgcacttaaacatataaggaagtgaatcgaacggttttactgtaaaattttcgcttcaataactatcttttttattccttacaggaattattaataaagtccttaccaaaagtgcctgatcttagcaaacgaattattggtgtggagccagccttagatcctgcttatcagaagcatttccgtcagaaaaaagaaatgaaggaattgcaaaggaaagcagatgctcttgaggtgactttttttattaaattggtttcaatttttcatccctcttaaatcaaaatgactcatctccattaagaccgcgtttaacaggaaggaaccaagccacatcagctattgccaaatttaaatgggcaatttaattttttacgagagaacgtttgtgcagactccattgaaaatttaaggaatttgcttggctttttacggaaaattcgcaggaatttgtacaaaaatccgcccaaccgttttattgtaaaagattaaattactcaattaaatttggcaatagctgatgtggcttggttcctttctgtttaaaggctgtccatttatcatcttgaatagatttttagtggggaaagttgtttgatttttttatccttaaaatatgttaaaatttttcctctcatatgttcaaacttttggttaaaactatttattctcccctgtttattcataatcatttgacaaacaagttaccagggtagaatctcattttccaagtctgaattcttaccctctacatattcatgggccattcctgaaatacttaaaagtaaataacactgaaatcgaatatatttactctgccctttcccctcttaaaaccatcaacacagatctgcacttcttaaaagaatatgtaacaatcagtttaacctacattctaataagcattttgtgatgaattttggatgaatagttgccacctcgcattgatttttatgttagatttttggaaaatcagcgctacatgaccattgtagtgttatgcaccacaaccccaaatggattgcattttgcaagaaggaaccattagcattgcaatgatgctaagattgtgcaacttcatcttttgcaataaaattgcggaaatcgtgaaaaactatgaaatttagatgctaatttttgtcttaaatttacagtttttagcgagtaaaatagaaactactaatggataatcggggttttcctccaagacaaaagaagttgcacaatcttagcaacattgcaatgctagtggttcctttttgcaaaatgcaatccaaatgtcccctcctccctgtaatgcaggcttcaatcctccatcttccctggagcgttttatttttgatgtttcaaaatccctgctcctgtttttttttttttttttttttttttttttttgagaagaacaagtctactttatggctgtaaatttgtacggaatactttgctaacatgaaagaaaaatcaagaaagttttaaagaaattacatcaactagttctctaataaaaatattatgcaatttttttggcctgttcttttttattcagtaagttaggaatctattgaaatctatagacatatttgttcattacagagatttaatagtccatagttatcagaggaatttttgacacattcacgtttcgttccaggcccctcaaattttcagggatttaggccaagtggaatctgtttctgtagatacactcgtccgttctgtgaaaatttgatgcctctacggggattcaaagcgggaacctgccgacctagagtcacacttgccaacaacttggctaatctgaccggcaaattcagatttgattttggtgcgcttttggccgaagtatcagttcaatcctatttaaaatgaagatacttaaatcttaatttggcgtttgcaattagaaggtcccttttcctgtggacaaagttttgtaatgttctacactatttttcaatatttttttgtttgtcaaatggatccaaccatttttatcaattcttgttttcactttcagacggaaatccaagaagaaattatcaggcaaaaagcaggtagcggaatagacactgatctaaaagtatttccaactcctgaaatgacaaaggtaaaatttgcattctttcctcttgtcaaaagtcttatgccaatttgctggcattcatcatgccaaccctccctgcatgtaatagatcttgtcttataggtctagtatatgtggatgtaattttgcaagctgtgcgccaaactttataagctgttcaccagtgttactatttttccatccatataaggaggctgcaaataaaatgatggaactctgcaccagctaaattttgtcactgtgtatttgatttggcgttctttacaacctcctgagcagaacatgcttttgaaaatgaaaattttttcgtgcaaatctcaacaaaagcagggctgacgagagaattattcagcatttttataggctctgccactatgtcagatcagcggacgaaactgtgttcggaccttgaccctacatttaatcacttgctgttatcaaatatcattcggtagaatttcgattattttttacttaattctattcaaacgcaagcaaggttgcaagtcatgtattatatgtctgtccttggtcggcaagaaatggagaactgttttcgatcacccattggcattgcaacatttccactgggtgtgtgaaggtgccaaaaatcattgcaaggtatctagcgaccaggagaaccgggaagtgtcagggaaatcaggggaaacgtctgggaatccgccaaaattctacatgtcagggaattttattttgcaagcaattttcgtgtcagtaaagcgtcagggaaatcgaaaaacaccgattttttggaaaaagtttcgcgaattttattctagcagagatttctaccaaaatttctcccaggatttctgttttttttaaaaatgaggcaaaaatatctcgcataagtttagacaccatatattttgctctatttattacacgatattcctaaaatatgagacaattcttactcacatctaatcagttcagccgtgtcaaaattaggaattttttttttttttttctgtcagggaattatttttctgtctgtctggaaattttacatttttccccggtttttggccatttttgtcagggcaattagagaaatgtcggggattttttttttctttttgaaaattgcgagacaccctgtacttgctgtcatcaaatatcatttaggaaaatttcgattattttttactttcattctattcaaacgcaagcaaggttgcaagccatgtttcatttccctggccaggaagaaaaagagaactgtcttcaatcaccaatcgacgttgcaacatttctattgggtgccaaggtacactctactacaggtatggacaaacggggtgccgaagtggcggcgctgagaaaataggcgatcgagtgacgtatgaagtcgtaccgtccatttgctgcgcaggttttcgcagtcgtactctcgatgctgtcaaatctacgcgttttgacgactttctaaaattccatttgtccatacctgtagtagagtgtaccttgctgggtgcatgaaggtgctgaaaaatcattgatgctaatcaacctcctttttacctgcgtgattttaaattttgatcgattttgttccaggccttcaaagagatggatcccattttaataggtgaagtagtcgttcctgtacccgccagcgatcccgacagtggtcaaactaggaaattattcttagatagtaatcaattcaaatgccttcaacagaagctcttggctatgggaacgtag

SEQ ID NO: 32 - DNA, 21005 bp, Bemisia tabaci
  source 1..21005: mol_type = genomic DNA
attcattcctccacctgtgcctgtatttacaaaaccctcgctgttctattcattgaacctttcctgatctttttattaaacctttcctgttctacatattaaacctttcctgttctatttattaaacctttcctgttctatttattaaacctttcctgttctgctcattgaacctttcctgtttttgagctcgcgcgaactcgggccccgaagtgtgatcagataaaatcgttaacttgcactgtcccgctcgcttatatccagttttttaattctggaaaacgcgtggcatctcatgtgcagtttcgtgtggatatccggtccaagtgtctttagtgacgggcgtccagcgtgaaatcagcgccgcgagggaggtgctcggtgcgacacgacgtctaaccacgctcgctaggtcatcctcgagcaagaaccgcggttttcggcggagtttccattgaacttaggtggtttttaaatcgatgcctgaccacgctcgacaggtcatcctcgagcgaaaaccgcatttccccgcgcagtttccattgaacttaggtggtttttaaaccgacgcctggccacgctcgacaggtcatccgcgagcaaaaaccgcggttctacgtggagtttccattgaacttaggtggtttttaaaccgacgcctggccacgctcgacaggtcatccgcgagcgaaaaccgcgtttccccgtgcagtttccattgaacttaggtggtttttaaaccgacgcctggccacgctcgacaggtcatccgcgagcaaaaaccgcggttctacgtggagtttccattgaagataggtggtttttgagacctggagcgacgccctcgccccttctgcgtgaggatccggaggtacgcccaacacctggccgagatgaccatcgtcgtggctcttatctatttcctaacctcgagcgtcctcaatgtccagtcctacatcctcggccgcagaggtaaacactatttattttatttatttatttataattcatgtacataaatgtcacgtgttgtggctataatacttgtcaaccccccctaaatattacacattaatataatataggcacgtaagaacacagggaagcattaagaatattataaagttttacaaaataaaataaaaggtatagaaaattacagttaaatattatttaaaaaaaatcatttaaggagtaaaaagccttgccaactagtaaggcttttagaccagccataaactctcttacttcccatttctgaagagcttttctcaggttcaagggaaggttgttgaacagtctgatggcagtatgagacacagactgttcagcaaccttcaggcaaacaatttcataattaatgaaagggtttctcatgttctttatgttcatgttcactatactcggaactagatattttcaaagtattgcctgtatttcatacgaatcattgttgaaaatatttgaacataatttaaggagtagcatctaacaatattacaaataaaaaggaaatctcgatgctatacattttttaaaggaggggtatatttattgcggacatattgatgattcaaatcatcattgataatgggcttattatagcattgtttctgcatattttttgctttttacctcttttgttcgcttctttatggtatagagtgttcaatttttttttatggcgtatcgacggcgtaagtccgcaatcacatatctcgtttgccgtgtctgaaaatctccacctctatgttactttttaaaagagagcaaatggacatccttccttgaagtttttgcagacttttcttcgcacagagaagaaaaatcacgacagttttaaaaaatttccgtggagtagttttccgtttaaaaaataaagtataacaggaagtctgccacgtcgcataccgagttaggtgattgccgacacacaccgtcggtatgtagtgtgaggtagtttgctgtttgtaaccacacataattatgaacttcaatgccctgatgatgggtgcaggggtaggccacctgaaaagcttcgacaccatttgagtaataaatataccccttttttaggaaatgtatagcatcaaggcttcctttattcttaatattaattattgtcgaggagacatttaaaacatttataaaataagaaaaaccaactctgttggcaacgacagttaatacaatggactgcattttgcaatttggagctatgaattctggctcttctggaaaaacacttgtatgcatagggaaactataatggcacatacgttgtttttaaaccgggctagaacttatgtgcgaaaccaccctggtaaaaatttgcgaaaggagctgcgtttcaaaataccataggaattcttatagccggctaaagaaggtagtagaaaatcatatagctggctgtagaaagcggagaaaatcatatagccgggctatacaaagcgataaaaaagtatacagccgggctacagttcctatcgccgggctttacactttatcgccatcggctataaaaggctataagaaattgtgcagaaattcgtgtgctttggaaatcattaagtttgatacggaaccaccataaaatttacaaaacacacattatattttcctttaatacgtattttttttcaatcaattaaaatgagaataattcatacaagatgtgcaaacatttcaaaatcatgagttgaaaaacgctgactccacaagattatatattggagcctaacacggagcggagcggcgtgctgccagcgataagcgcgcaccagcgcctacaaaccaaacaaggatacttcacgcattgcgcaatgcgtgaagtatccgtgttaggtttgtagacgctaaggcgcttttcgcgctggctgcccgcccgccgcgccgcagcgtgtcacggcgcttgaagcaactatttcacaccagaggtattgcacagtatcatacgaaattgaaggcgctccaacatattaggaatggcaggcatctttcaaaagtacggagcttttcgcgcaaaattaatcaagatactactgcccaaaaatagagcgttagtccaaaaactcataaagtcctagcatccgtaattagtaaagttcagcatagactttatcgcctggctgtcgctcaatcgccatcggctataaaaggctataagaaattgtgcagccggctatagaaactattgaaaatcttacagccggctttaggtctatggtattttggaacacagattctactgccaatttttaccagggcacgtatctccgtttgcgacaatgcagacttccgccatgctttctttttgctttagaaagctactcagtgtaattctttgagaaatttcttgatttttttctttcatttttagaagaagattctgtttgaatttcaagccgtgaagttgacttgttcctcttcgaaaaaataaaaaaggagcgaaattttgtaacaccgcaacggacatgttcggctccgaatttttgccatgattcatgtttcagaaaactatttttgagtactctttaagtggtttttgtgacaggtaacatttcggttaaagaaacgttgaagaacggcaagaagatctactacagtttttaacatttaagatgttagtaaaaaaaatgtttgagaaccctccgaaaagcagcaactatttattaaggtccttttcatgtatttctacctagttgatctcataaacgaacccattattttccggctgacgtaagcgccaaaatttcaaaaatagggttataatggattgttattgccaacttgaaacttgaagttgtatctaacgtagcgaaacgacgcaatttcaatgcctcaagaaagtttttgaatttacgttatgtacagatcgcatgaaatcgtgtttgtggcgctacgccttatatgaaataaatcgatccaattaataaaatgaagaaattctgtgttcatttagctttcagattattcattaattttaggaagtaggtatctcagttttagtcaccgtagtacttaaattctgatttctgctgtgctgagtaaaaacgccgtatgatcatccgaattttgccaaatttcctcgcaaaatatttgtttttaaagaaagttatgaatatttttccttgacatttttaggcttctttttgcttctttgagcagattgtgtgtttttaccggcggcaggttgctagcctcaccgccgagccctcctccttagcccgggcttgggaccggccggcagcactccctatagaagacagtacaggcggagttcggcggtggtcggagcacgttgacagaatggatgaagagagactggcaaaagtttgtatgactggacaacccatagggaaaagactgcctgggcgaccgcctaagagatgggcacaaagctagctctcttctcctgaagatgattgaattttcctgttgctatttgtttcattgacttgacgaatctttacagataattagtacctatattttgaatattttgtgctcggcactcgaaggcttgacaaacagggccatgccctagtcgttagtagaagaagaagaagaagacatttttagacttataagatcaaattacgaactaaaccctctgaaaaatcgggagggaaacattcacaaattttcgtggtatttcgaagggaatttggcaacgcttggtggctcatacggcgttcttcctcagcacggcagagttgttacagtgcggcgtggcgtgctttgcgatacatcgattgatatgccactcaaacctatagaaaaagatcgattatcagggtgttcgcagcgaacaccttagtaatcgattctttaccgtagcttcaaatggcgagatatcgataatcgatcattcacgcacgccactgagttgttaacagttcaagaggccgataaaattgatcgtgtgttgaggagtttcctcttgagaccttacccttgcgcctcgcgcagcgctatgccactgctttatgtccatgtaatcaaagttcaagatcatcgtggcggccgctggtgagtggtttcaccaatgcgctaaacttcgattcgattggtttctcctacttaagaattccacatggcggccgtattagacctacattctcatatcggccctttatctacggtgacacccgggctctccattcagaatttctccctaatatcagcatttgagggacttggagggaaaggcgcataagtgcagttttcaccatctcgaaaaacacgtgtttttccatggctccttatggctgaaacaaagttccaactgactttgagacgcttaaaaattggaatttgagagcggatttttcacagaatttgcattcagactggttttactcgaaatcactaacatatcaatttttgtaaaaaaaaaaaaaaaaaaaaaaaaaaaaaaaaaaaattgcacttatgcgccttgtccttctaggccttcattttcccccgcgtccctttttgcatttgaattttgctctgacaaggaatcggatgagatgtaccgaaataaagattacattcgacctttttagataaggaattaaaagcggagtattgatgaaggccgtttttgagcacaccgtaggtgaatttcgtcaactcttccattttttgctcattgaaagtctattttttacggaatgcatcgcatggtccggtcattttcggcgatttttggtttcagtactgatccatacaaggatctgaagttcgattttggcaagaaatgtggatttcttggccccctttatacaaatcctaccaaaaaagattgattctgatgtgagatgagtcgctctacagtcaatcacagaatctacagccaattcataataattcttagcctctttgttcacataggatggccttccgccggctgggcagttgggcacccgtacatcgaaagaaatcgattatgtatcgaaatgttaagccggcaccggtcaggagccatggaattcggtgacttaaaagtggcgccagctcctccattcctatcacgactctataacctcctctcatgaccactctattgcagacatgcattgggaaaaaacatatcgacggtgaaactaccaaaccacgtatctcgtttgcggtgtttaaaaatttacgctcacattttatttttttgaagtagaccaaatcaatatcattccttgaaactttcacagaattttctccgcacgaagaggaaaaatcacagaaattttcaaaactggacgttaagtagtttttcatttaaaaaataaagtatggcaggaagtctgcgacgtcgcaaaccgagatacgtggtttggtagtttcaccgtcgatatcggatctagagtcccgtctcttgaaaacattgacaagaaaaaatactcttgattcgatcagatgtttgcttagatcaaaaggaaatccgctcaaattaagaggcttggttcttgatttaagcaaaaatccgattgaatcgagagtatttggaccgcgttcaacagaaaggaaccaagccacatcagctattgccaaaaattgggcaatttaattttttacatgaaaacggttgtgtggatttccgtgcaaatttcagtgaaaattctccatggtacgaagcaaattccttaaaattttcaaagaaatccgaacaaacgctctctcgtaaaaaaattaattgcccagttaaacttggcaatagctgatgtggcttggttcctttctgttaaactcggtccatttttccttgtcgatgttttcaagagtctggactctagatccaatgtattttttttctagtgtgctaatctcaaaattccgcatgtttcagtctccgaggactcatgtcgcatatccttgagccgggacctggccacgatcccgtcgctgatgatcaacgagagcgcggggaccctcctctacccgacagaggatgacgtcatcgtcctggcgcccaacgccgagttcctcctgtactgcccgtccggcttcgccgagcgccggatccagccgaggggcatcagggtcgtctgcaagcgggacaactcggtcgtatacggcaacgccacctaccggatcaaccaactcggctgcaccaagcaccccgattccaccctccgccgaaccggagccacctgctcgcgagggaactacacgctccttcacgtgggctacgagtatgagtccgaagagagtcccagcgtcggcggtgaaggagatgatggaggaaacggcgtgggtctcgacaacgacgtcgacgcggacgaggaggagacggaaacgggtcgaaacgaaactggaaacggtatcgaagcggagacggaagtgagccgggatgaaaccggaaatgagatccgtgaagttgaggcggagacagaagtgagtgtgaatgaaggtggagacagcgttcgtgtagtcgaatcgggaatgggaacagacgcaggtgaaaccggaaatggggtccttgctgtcgaagcggagacagaggtaagtgtgggtgaaagtggacgtggcgttcaaggagtcgaaccggaaaaggtaacggtcgtagatgaaaccggaaatggggtccttgctgtcgaaggggagacagaagtaagtgtgggtgaaagtggacgtggcgttcaaggagtcgagccggaaaagaaaacagccgcagatgaaaccggaaatggggtccgtgcggtcgaagcggaaacagaagtaagtgtggatgaaagtggaagtggcattcggggaggcgaatcgggtaaggaaacggacgctgatgaaaccggaaatgaggtccgtgcagtcagagtggaagtagaagaggatgatgagaaaacggcagaagtgaagatggaaatgggaatgggtgaaaccggagacggtttccgtaccatgaagcccgatcatttcagtggtaaactcaaagttggtaagcagggaggagccgcgtcgacaactacgaatggaggaattaagaatgattttgagctgagaaacttgaaagtcgtgcccgaaaaagaaccgacggatacggaagttgacacgtccgttaccgtaaaggagagcggaggtgactcgaagctcctaagtttgttcgccggttatcggatgcgaatacaagaaggagtccacaatgttgccttcgacttgcctttaaattttaggagcactggtagcaggaaactcgctcctcttgtagttgaaaatgtccgcgcgttgggcacattcacaaccggaaacaacatgagtggtacaaacggtcgcgtgacgcgtgatgcatcaaacattagaataagacaggaagagcagacaccaatcagagacggaatgaaaatgatactaatgaaaaaaatgtttgcaaccggaagcgacgccagccttctcgatgacggttacagcttaaagccgcatgatgcacgcttcaccggaaacgatgtcaggctgactgaaagcagtgctagcctcactgcgagtagcaacatccgcatcggtggaattacgaacattaacgggaacgacggcggcttcatcggaggaagtgtaacccctgccgaaaatgcagctagctccgccggaaatagtgtaagctttaccggaaatattgaaggtctaatcgaaagtaccaccattcacactgaaggtgaacccagctatacctatactggttcgaacctttccggaggtgacgccagctttactagaaatggcgccggctccaccggaaatggcctcagcctttccgaatatagtgctaattccatcaggagctataccgctttcgctcggaacggccacaactctgctggaaatgcccatgacccgagtctcaccggaaatgaccccagtcttaccggaaatgaccccagtcttaccggaaatgaccccagtcttaccggaaatgacctcagtcgtaccggaaatggccctagtctttccagagatgactccaattttcccagaaatagtgccagtcttccaagaaacggtccgggcttcgcccgaagtgattccaagcacaccggaaacgccaaacggcggaacaggaaacggcctcataacaagagtgccacaagcgaaaacgttctcaatccagaaaaggcgtctttccgccggaggccagtgggcgaagtgaggttcatcaagctgatcgagatctgctacgacctggagcggcaccgggcggtgtacgcgagccacgagctggacgagcggatccgcggacgacagcacagcgtcccgcggatcaacttcaagacggacatcttcgacgaggagcgcatcgacgtgaacgccctgtacacgcggaaggggcagctggcgcggctgacggctctcctgggctcggccgacctggccaacgagtacatccgtcgcgacgaccatttcctcgcccgcgggcatttctcgcccaaggccgacttcgtccacgccgccgagcagctggcaaccttctactacgtcaacgtcgcgccccagtggcagaccttcaacgggggcaactgggtcaaactcgaggatgctctgagggacctcatcgtcaagcgccccggaaaactccacgtttacaccggtgagtactccctgtgattcaaaccctagtggaagtcagtcgacctcgtgcggcaagaaagaggttatgtcccgtcatttcccgtcacctcccgtcacctcccgtcacctcccgtcacctcccgtcacctcccgtcacctccnaccgtcacctcccgccccctcccgttacctcccgtcacctcccgacacctctcgtcacctctcgtcacctctcgtcatctcccgtcacctcccgtcacctcccgtcacctcccgtctcctcccggctcctcccgcctcctctcgtcacctcccgtcacctccagtgaccgcttgcgaaggatgggattcctgaaactatgccttcgttttgctttcctctgctcatcacgctcacgggctcacgcgatgtgacgggacagaacctcctgccgcactagatcaacctccactacttccgtgctaaggaagaacgccgaatgaacattcgagagttgtcacatttcctccgttaaaatgtttatttttaaggaaatttatgaatattttttactgagattttcaggaactttgggtgaaattgcgaacaaaattatctcaaaaacttgaagaaaaatattcataaatttatcgaggaagtcgtgttttacctaaggaaatgtggcaatgtctgaaggatcatacggcgtttttccttagcacggcagactagggaagcgatttttcgcgccttgttgcccaattttgctgtaaatatcattattcttcagttaattttctttctgggatgccttttgaagagatggtatggacaccgagttccgtggcgaataatgaataagaaatgatggcgcgactctaaatatgagaggaattcgtctaggcaaagtttcgtgtctggattcggttaatttttggatagatgacagttgtatcaccgttgtttttcgaggtttctggtgaaacggtttactccgattcactgtttgaccaacctccggagatgagtcgagaaatttaggaaaatttccacaatccttcgaccccagaattgcaggctccaggccggacttattgttagggcgtgtgcagggtgtgcggcgcacatgggcgccagcctttggggggtgccaggaaagaagaagagaggtaaacaagcagtgaactccaacacaatgtgttgataaggcgcgtcattaactcgcacatatcaacccctttagttttcatttacagagatttcaaaataggcaaacagcataaaaagagaattcacgatccaacactgcgaggtcaaagacgcaccttgacgagaccgtgtattgtgaaagtagaaagctattcgatcgaatttaagttttttgatctgcctcaagcaaaatcttatcagattcttgaagaaaagtgctacggaataatttaagcgaagaaaggaaaaattctgtcgaactcctagaagataaagtcgatttaaaggtattttggggctaaaatacccaaatcaccggtagtaaaaatcccgttatattattgaaaagaaattgactcgatataaatgcaattgcattaaatacgtcttgattttgttattttaaacgtctttccatgcaaagaagttcaaccatgtcgttgctttattcattcatgaattgaaagtaagcaatctacatcccgaaaatctactgatttgccgtaaaaaattgcagaaacttgatataccaggtcgatgcacccactcgttgaatttaccaaccaattttgtgagtgcannnnnnnnnnnnnnnnnnnnnnnnnnnnnnnnnnnnnnnnnnnnnnnnnnnnnnnnnnnnnnnnnnnnnnnnnnnnnnnnnnnnnnnnnnnnnnnnnnnnnnnnnnnnnnnnnnnnnnnnnnnnnnnnnnnnnnnnnnnnnnnnnnnnnnnnnnnnnnnnnnnnnnnnnnnnnnnnnnnnnnnnnnnnnnnnnnnnnnnnnnnnnnnnnnnnnnnnnnnnnnnnnnnnnnnnnnnnnnnnnnnnnnnnnnnnnnnnnnnnnnnnnnnnnnnnnnnnnnnnnnnnnnnnnnnnnnnnnnnnnnnnnnnnnnnnnnnnnnnnnnnnnnnnnnnnnnnnnnnnnnnnnnnnnnnnnnnnnnnnnnnnnnnnnnnnnnnnnnnnnnnnnnnnnnnnnnnnnnnnnnnnnnnnnnnnnnnnnnnnnnnnnnnnnnnnnnnnnnnnnnnnnnnnnnnnnnnnnnnnnnnnnnnnnnnnnnnnnnnnnnnnnnnnnnnnnnnnnnnnnnnnnnnnnnnnnnnnnnnnnnnnnnnnnnnnnnnnnnnnnnnnnnnnnnnnnnnnnnnnnnnnnnnnnnnnnnnnnnnnnnnnnnnnnnnnnnnnnnnnnnnnnnnnnnnnnnnnnnnnnnnnnnnnnnnnnnnnnnnnnnnnnnnnnnnnnnnnnnnnnnnnnnnnnnnnnnnnnnnnnnnnnnnnnnnnnnnnnnnnnnnnnnnnnnnnnnnnnnnnnnnnnnnnnnnnnnnnnnnnnnnnnnnnnnnnnnnnnnnnnnnnnnnnnnnnnnnnnnnnnnnnnnnnnnnnnnnnnnnnnnnnnnnnnnnnnnnnnnnnnnnnnnnnnnnnnnnnnnnnnnnnnnnnnnnnnnnnnnnnnnnnnnnnnnnnnnnnnnnnnnnnnnnnnnnnnnnnnnnnnnnnnnnnnnnnnnnnnnnnnnnnnnnnnnnnnnnnnnnnnnnnnnnnnnnnnnnnnnnnnnnnnnnnnnnnnnnnnnnnnnnnnnnnnnnnnnnnnnnnnnnnnnnnnnnnnnnnnnnnnnnnnnnnnnnnnnnnnnnnnnnnnnnnnnnnnnnnnnnnnnnnnnnnnnnnnnnnnnnnnnnnnnnnnnnnnnnnnnnnnnnnnnnnnnnnnnnnnnnnnnnnnnnnnnnnnnnnnnnnnnnnnnnnnnnnnnnnnnnnnnnnnnnnnnnnnnnnnnnnnnnnnnnnnnnnnnnnnnnnnnnnnnnnnnnnnnnnnnnnnnnnnnnnnnnnnnnnnnnnnnnnnnnnnnnnnnnnnnnnnnnnnnnnnnnnnnnnnnnnnnnnnnnnnnnnnnnnnnnnnnnnnnnnnnnnnnnnnnnnnnnnnnnnnnnnnnnnnnnnnnnnnnnnnnnnnnnnnnnnnnnnnnnnnnnnnnnnnnnnnnnnnnnnnnnnnnnnnnnnnnnnnnnnnnnnnnnnnnnnnnnnnnnnnnnnnnnnnnnnnnnnnnnnnnnnnnnnnnnnnnnnnnnnnnnnnnnnnnnnnnnnnnnnnnnnnnnnnnnnnnnnnnnnnnnnnnnnnnnnnnnnnnnnnnnnnnnnnnnnnnnnnnnnnnnnnnnnnnnnnnnnnnnnnnnnnnnnnnnnnnnnnnnnnnnnnnnnnnnnnnntgaccctaaatttgcggctgtacagaaatacaagagtaggcatgtagtaagggggcgccataaatccatcgaacaggagccgacatagcattttaggccacgtccgccatcttggatttcagaatttttaaacatagtaaaaattcgagtttccggtcgaaaagtaccctcagacaccgagtttcaaaaaaatccatcgaacaggagccgtcatagcattttaggccacgtccgccatcttggatttgagaattttcaaaaatcgactaaaaattcgagtttcccgtcgaaaagtacccctgctcctgcggttcacaaagctctaacgaacagaaacggaggccagaaccggggctcattttaggccacacccaacattttggagttgagagttttaaaaaattgactaaaaattcgagttttccgttgaaaaataccgtgtgataccgcatttcacaagactcgaacaaacagaaaccgagatagcattttggcccacgtccgccatcttaaatttgagaattttaaaaaatggactaaaaattcgagtttcctgtcgaaaaatacctcctgacaccgcatttcagaaaaatccatcgaacaagggccgagatagcattttaagccatttcggattttcgaattttgaattttttgaattttgacagattttgatttgagacgcgtgatcctcaaaatcgaagttcagattcggattcctcgtaaaaaatcgatgcgatttcatgtatcataccctgacaccgaatttcaggaaaatccatcgaacaggagccgagatggcattttaagccacgtcagtcatttcagattttcgaatttggaaaatttgacttaaaacgcgtgatacccaaaatcgaagttcagattcggattcctcgttaaaaattgatacaatttcatgtatcatacccgagcatagcgtgaaggaaagagacgtacactgaaaaaacgagattagggctgggccctagaattgcttcacctccaccgccacaggggcaggccctgcgggggtaaggcccagccctacctggaaagggtgcagctcttaccaggtagggctgaaccctaaagtaggtagatttgggctctaagcttgccgggcctgcccctatggcggtggaggtgaagcaattttcctacccggttagggctgggaccttcggtgcaggtaccagccctaaactcgttttttccgtgtaacgtagacatacagattcaagcatatgaatgcaacgtggcaacatgggtagcgctcagtgggtcagcggaggaggaagaataagaatttatcgtgagaaattcctcgcaacgaaactgaacgcttagccctggcgcctccctgttcggtttcactcgggcgacccgcgcggcggcgtagttcaaaggggcagtacgaaagaatctatacgcgtcgttaaacctttttccttcacgctattctaacatatgatgcataaaatctcatcaatttttcacgaggaatccgaatctgagcttagattttcgatattacgcgttttaatctatttaaaatcgtaggagaaattacagaattgtccttgaaaattgatcacacattagtgtttttttacgtcattaaacctctttccttcacgctattctaaaatttgatgcatgaaatcgcatcagtttatcacgaggaatccgaatctgagcttagattttggatattacgtgcgttaatctatttaaaatcgttggagaaattacagaattgtccttgaaaattgatcacacattagtgattttttaccccgtttttttctacgttcacgtaatgaaattagatcaacagttgactcatcgactagtctagcctaaccccccagaatcggtctaaagggcgaacgattttatcagataagatgtgcggtcctagtttccgggcaattttgcggtttgatggaggctgcgatgaggagaaacggaagatatgcgaaactcgggcggatattaagtgagaaaccaggtaggggaaaggctttcttcccgaaaagttagtgctcgggccaacttacatggtcactggagcattgtatagcaggttgtgggaaaatatttttttgcagcaacaaccaattggatcgcattttgcaaaaaggaactaagagcatttcgatgttactgggattgtgcaacttaggtacattctttgcaaaaagtaaactttgcgacggtaattttcggaattcatagtttattgggagtagaggtgaaactagtttagatgatcgtttatgtttgcaaggttagcgacattggaggaatgctcaggctggcggtgtgaacatcaatagacaacgaggaaatcgatcgagggatcgaaatcctaactctacattaactcctcactgtgatgataacggttttttatataaataaattgaacctttccgctcatggaagaaagagcaatttacttaggttaaaccacacgccaaacgtcactatgacagtctcagtaatatgaaaatatagcagcctcaatcttgacgctcggctcaaattctacatactttgaacgacacagtgtgggaaagaaacaatgatcgattgagcagtctgctaaagccgttgtagtgagcaatttcactcgcgtagggttgtgtttttcttgtaaccaggcaattcaaagttcccgtaaccaatgaacaataaaaacgttaacatcttagccagaagtcgatttccgtcgttttcgatgcgcgaatcgtgttctacgtgaaattctggtaaagaaccatgtatcagaaggcctaaattcgtacctcctttaatggtttattcaatctaaaaaagcgaacatagagaactttccaaacttttcggagaataaaatcttttatcggaagggacgcggcaacgttggaatgatcatacggcgtcgaaacacaacatgggacttttcaggcccattgttcaataccgcgattatcctgacgcgagttttaataatcgcaccaaacacggtgtggtcagcgtcaaattttcatcagcgcttgccagactgccgagatacttcacgcgttacgcaaaacagtgcgctcggcgtcaaacgcgtcttagcgcctactagactgcatggatacttctcgcattgcactaaactcaatgcgagagttatttgcgataactattcgactgcgggtataggcacattgccgctagctggattgaaggcgcatcacaccgtgaagatgactcgacactcgaccgcgctcccttattctctggcttgtgcggcgctaaaatcgctataaaactatagaaccacgtgttatttcttttgacggtccctgcccggtttttaccacatttaaaaggtaaatatgtattttaattgcaacgattcagaaaatcggacgatggttaaacgatgcagcgattgtgaaacttgatttgcgtaaaattaattttgatttaataaaatgaaaatagaatgaacgaaaatatcacgtcgaaattttcgatgcttacatttgagaccatttaggaacatatttgtaaaaacccttcaaaaaaactatgtgcagctttttaaaaacggtgtcaaaaaaagaagaaaaaagtggtgcaaaacgttgcaatcagagataaatacccttgttttcatgtgcacccgtcggctctttaatccattcatttcttaaataacttgagcataattgttcaacaattttttacgtgtagtttattccagtggttagtggcaaagtagcgggcacaggcccctagtttttaatctatttggatgcatttggaggcttccatgatgaaaattcaaaagatgttcgctgagtgaacacggtgtgttcattaaagacccgacattgagagagatcctcgatcgacgaggattttttcccaccgtccagaatttctaggagggggggagcagctgatactgtttcaattctaggggagacaggccccctccggaccccccttcgtacgcccgtgcgtatagagggccccaaacataagtgcaaatgaaaaaaattatcaactcttctcgttaaatatattgtttatttatgtatcgtacaaatttaagttataattcaattacatgtccagacttaaaattaaaggaatgagccactagatttgcataccataggaaatcttgaagagtccgcccctttctttgacttggcaaaagagaatcctctccctacactgttcaaagagtcaactagtggttttctatgagattttcactgacattcatttggtaaacttctgagaatccatcgattttttgaaattttctgaagaaaaggagagattacgatttgggccaaaatcggcccctccacggaatcgggaaatttggcagttgacaatgaaatagataaaacacacagaaatacagaaatagtcgggttttgctgatactgtcaactcttcctcatattttgtcgaaaacatttctttgtgttctataaacggaaaggtacgaaaggggcgacgcactgcgcattgaagaagaatattcaactgaaaccagaactatcacaaagatctcggtacccacgagttgtgaacagtgaatctacatctagtctatgaaaaatgtgaacggcatcaaattatgaatacaaattatgttcttaaaatctcgactaattcagtaactttaacatgtatttttgaaaaattgaaaatgatagttccagttatcttaattgcagtacatggaattttttcctgttgtgtaattatgtttccttaagttttacttttactccactatgctactaccaccactactacccccactatagcggagatgttgcatgtgtgaggaatttgcgattttactgttgattcttaagcaaaagttggcgagaaacacgatggtgccactggttttctctgaaatcatctcccaagctcaaaaaaagctctcaagttggggccaaaatggaggggatatcccacgctatcctgaaagtccacctctaggtacatcaagacaaactctccatgcgaagatagggagcaaatacattagcagggttgccgtcttctcagttttagagttcccaaataaagtggcagccctgtcaatgtctgtcaatgtatttgctccctatctttgcatggagagtttgtcttgatgtacctagaggtggactctcaggatagcgtgggatatcccctccattttggcctcaacttgagagctctttttgagcttgggagttgatttatgagaaaaccagttgcaccattgagctatttagataaggagcttaactctttatctaaattgcgctcattaacttttttgataaacttcaaactcgaacgctctttttatcgaggttcaatctgctattcctgccgggagcctcgtcctggcgggatctcattctcctgcctacttcggactcagctcgtactgctctctcttgtttttctaccttggctatttttggacttacgattttttggaacttggaaaccccggacatctcggtgaatcgtcgaaagacctttctttattctttctgatatcttgtcattttagacgacttcactatttcgtcaaatatattcgtcaatttcactttttcaaaattttctcaaaatttttctgatcgataaatttgtaaaacgccaaacttcttgtcttccttaacttgaaataatcccaagcgtaaaaagcatgaatttttaaattttcatttttgatcagtttgctgatgtgctctcccacactgttttagcatttgtagttgtcaaaatactttgtttttcactccaagggtgaatcacgaagtatttcgtcaaatacatctcattaatcgctcctccagtaatcgagttgattcttcataagagcaaatattaaattttataaaattacttcttatagagggtcgaacccatctctgaaggaagggtgacctttcccttataagggtggccatcacaccatcgtgtttctcgccaacttttacagaggaatcaacagtcaaatcgcaaattcctcactccagtctccctcacaacatctccattgcgcatgttccagggacccacggcgtgatcgctctgaaggacatcaacgacaacgaagtggagatctacctgggcgagaaggacggtcggccgatcgtgccggtgccgaagtactactggaaggtcttctaccggccggagcagcgggagggggtggccgtggtcggactcaacaacccctaccgtgaggtggccgagggtgacatcctctgcgaggacgtctgccgcgcctacgagtggctcgactgggacaccaacaaccaggacaagggcgtcatgtactgctgtgccctcggcgagttccagcggaaattcatccacctcggattggaggagtcggagacggtcaccatccgctcggagggccaagaggacgaggaggatgagcagggagagcgcgtcgttgaatcgacgactttcaagatggagtcaagctcaagcagcccgattcttggatccacacacctacagcacaagatgtagccctatcaagaaaaaaaaaaaaaaaaaaatgaagattgacacgtggcgcctacaaacctaacagggatacttcacgcattgcgcaatgcgtgaagtatcccagttaggtttgtaggcgccggtgtataacgtcgcaaacaggacgcacggtaaaacggtattttttttagcggtcaataactttatcaggaggggttttacgaaaaaaagctcttgatgagtactttacgaaaccacaattgtttttgagtcccgacaattaggacagtcactatgacgttataaccgaacacgtgcggtattttggtaaaagacttttctggcatggagaaaaaaaaggaggtgtttgtatcttgatgtttgtttaccctgtgacgtaggtcggtacgacctggccagcgaaatccggaattcgaagtatgaaaaacggaccataatgtcccatttttttgcttaaatcaactcatgatataatttcaagtaatttttatagaatgactttttcccataaattacaccatttccaagaaaatcgacgataaaagtcgctgtaccgacctacgtcatcaaaaaaattccaagattcccgaaatgcaaacacctccttttttcctctatgcttttctgtttgtttttaaccactgaacaacccctgagagtttgtcgccacttagttgttacaccctgtataagcgcgtgttgtccatgtttcgtggtctacgtatgccatttttgcccttctggcatctttcattccaagtgtcaccttattgtaacttgtaaagcttttctaaatcttcacacaactctctcggctccttcaagtctcaagtcctcgtttgctctcccataactcggtctcccgtcttttgattctttatttattttaaagtctcgtttgtaacattcgtcgagctttccgactttcagctagacgtttacgacgtcagacgtcacgcagggcggcagagttttacaaatgaagaatgaaagaattcacggaactttgaaaaatttgggaaatttttccgaagtaagtgagtcccggatcgagtgcaacgttaggtcgatagtattaagtgttaaattgtttgtaatacagtgcggtgaccgtttttcgtctgtgtctaaagccaattttccctctcttcttgtactttggtgcttaaataaataaattaataacttttgtcccgtgctcaaaaattggaaaataaactatcagaaccctccaacaatctggttatgaactctcgtttcatgaaatatcgaatgtgctctgtacctttttagtcagcctattatgttcttcgaagttgggacctacctcttcgttcctcatcatattacattattttctattttcatgtattgttttatatttaccaagctcaaaaataggggaataaattccaatgtctcacagaaaactgctaagagacactcctctcttgaaagatataattttgacactcaccttatcatgatattttcataggtaagtatttatatcttgttttcattatcatccc

SEQ ID NO: 33 - DNA, 18879 bp, Bemisia tabaci
  source 1..18879: mol_type = genomic DNA
gccgggtattgtgctgctgatagctgtgattccgcggtgcgaacaaccagtccatcagtccacgcgggtctcgagcgccgagatccaggtgtcatgcatctcctttttgggctctgtttcttgcccctcctctccgccaccctcccgccgacacgcccatcgcaaaactgtaagttttcctgcagctttccgattttttcttttaaaaataaacaaaaaattaaaaaaagtatacgttcaaataaaatgagttttcgcgaatggaaagtttgcacacaaaaaggatgtgtcccattatggagggtattttggccctaactttgctcgaaaattgaaatagcttagaataatgtcatgtatggtcaaatcgactcttaatcatctaccctgtgcgaacttgtccttatttcaggtggttttcaaaggtttctgcctgattgaccagcgcaaagtagtgaagttttggagttttctcgaataattgctcattttcggtcctaaattagattgtttatgtatgaatacgagagactaccactttcctattggaatatgttaatcttcagtacacccattacaacatattcaaaggagagagtggtagtccctcgtattcatacataaacaatctaatttaggaccgaaaatgagcaattattcgagaaaactgcaaaacttcactactttgcgctggtaaatcaggcagaaacctttgaaaaccacctgaaataaggacaagttctcacaaggtagatgattaagagtcgatttgaccatacatgacattattctaagctgtttcaattttcgaccgaagttatagggccaaaataccctccttaatgggacacatcctttcattgcttcatttgagagtggttaatgagctaggttcgcgcagtatttttcataatttttttgtgaaatgggaaatctgagaaaaatagttttaaaagtgagagaatgtgccgccttattatgtcatttggcggcattttccactgaagctcatatattttggtagattaagttattttgtcatgtttcctccaataggtgttcaatttagaagccaaggatgtcgtcgtgctcagttttcttagcagttccattttagacatgaaattcaagaatttaagacacctgcaaattctctattattcaaattgaaaaatttccctgcctaaagatcaaattatggaaaaaggcacggctggttaaaagatgacaagctttaaagaagatttgcttttaaagaagaaaaattgatatgtgacaactttgcaagttggcagcactgtttttccttcatttaaatccatcaaaaatatcgattttacatgcggcaagctgcctcgtcaagaatcgattattttacatacatataaatggaagaaaaacagtgatgccaacattcaagtatcgccacggcgtgtgatacttgtacatggtgtcccttttattggaagtttgtttttgttgttatttgttccatgataaaatatttcaaaaaattgttttccgcagttaaaatcgaagagcttggtgacgaagagacagcgagagacagcgtccgcggtgacgtcagaaaacgtcaagcgcaggtgaggaatatttttcaaaatcgagaaggaagagagagagagagaggggggtactttgatgtttcaaaaaagaaaataagatagaagatatgattatgaaataatttcagagcgatgaccacaatgtatctaataaaaaataagtttgacatttttttttttttacacccttcctcattgattatacggacagtggcgattttgcaagttggcaacactgtttttctccatttaaatccactaaaaatatcgattttcggtgaggcagaatcgattgcttcacatacacttaaatggagaaaatacggtgttcccaactttcaagaatcgccactggttctggggatatatcgggagaccttaacgcatggatagaaaagtagtcgcggattaatctgactcctcgccgtggcgggacttggttcactccccttagagcgcatataagaattatcaagtttcgggctgattattgaaattgatagacaaagcgatagacaaaggaggcaaagggaatcggagcaattctattggtacggaattaagcgggtgattgcaatgaacaaaggaggtaataatagtggcactgcgatcctacagaacggaccactagacaaggtacgagtttcagcattctgatttatgtttcttcaccaaaatttcacgtagaacacgatgcgcacaacaaaaattaccaaaatcaacttcttacaaagatattaaatgattcctgatgcgtgaatacaaaccatccgctcatggaaactcaatgctctacgtgattcacatcgcgcgctcctcagcactcctagttatgcaaagcgttgactttttgagatacctcaagcctgtgtcacactatcaaagctagccatcaatatcaaggtccgatgttaagattggcttattagatgactcggaccaatcacaacattttaccttgacattttgatggagtaggtattttgataataagacacaggctttagacgttaaattagtcgaaaattcgaattcgcgggaagccgtttatcgtttaaatttggaaacattttgatgaaaaattacacaattttagtgctggaaaactaaatttgccgctgcatgcctgcggccaaacttcgaaaatacttaccttgccatgacatggcatacctcagtcacggcgttctaacatttttgtttccatctatatatatttcacttactattaatccctcctccccaccgaaattttactggacatgtttgtacgaaatgtttattgagcatttttggaagaaaaaaggaaaatcatatttgaaacctttttcttttttttacaggctattgactttcaagaatgcgcggctccaaataatagaactgggcactgccgtcacctggaggattgcctgataccggagtacacagagacatatagagaaaacatcaaacatttttgcgtcatcgatgtcaagtaagcacacctgcgaaaagcgtggcgaggtattcttgcgaatcggtttttgaaaatcctaaaatacgctcaaatattgattgtggtggcttagaaaatccgcgaacacttaatttctcgcaaggaaatcattgacgaattctgccttcgacctctaagcagaaaaaacctccgctaaatcgggggttttttcgcccttcattctgccgtgctaaggaaaaacgccatatcgacggtgaaactaccagaccacgtatctcgtttgcggtgtttaaaaatctccactcacattttatttttttgaaggagaccaaatcaatatcattccttacaattttcacagatttttctccgcacaaagaggaaaaatcacggaagttttcacgaattgacgttgagtagttttctatttaaaaaataaagtatgacaggaagtctgcgacgtcgcaaaccgagatacgtggtttggtagtttcaccgtcgatatgagccttcagatgttgccatatttccttcaataaaagccaaatttacccgaagaattgtgaaccttttttttaaaaaaaaaaatttccgacaattttgttctcaattttatctaaaatatctgaaaatttgaagggaaactatgcaacacttttctcgcaaacacatgttttatctgaggaaattcagcaactctcgaatggtcataaggcgttcttcctaagcacggcagtattgaatacgtgagcaggtcgatgaaatggattacatttttgcaataaggaaccactatctctagctcttccataaaaacacatatctgcatagggacaccaattgcatgtatgttgtttctaaaaagggccagaaatagtggttcctcattgcgaaatgtaatgctaatgttactaaaatggaagtttatacagaaacagggccggatttagggggtggccacatgggccgcggcccatggcgggtaatctacggggcggcaatgtttgtaatgtaggcattaaaaaaatcggatatagaaaaaaaaaaattacaaacgagaaaaggcgacaaaatctctcatttcctgagagtgtcgtaatttctaattttgtcgtctttcagtaatacaagagacagcacctttaattagtcgagttaagagagaaaccgaacacgcaatttggcttagaaagaaatgatgacgaggacttgagatgaaaagcagaagccctcggcgcggcgcggcggtcggcatggaacacatattagcgcctacaagactgcctgaatacttcacgcatggcgacaaacacagtgcggtcactgcggtcagcgtgaaacgcatagcgcctacaagcctgcgtgaatacttcacgcattgcgtcaaacacactgcgctcagcagcggtcggcgtgaaacgctcagcagcggtcggctcgaaacgcacagcgcctacaacactgtaggaatacttcacgcattgcggcgaacacagtgtggtctgcgcggcgcggtggtggaagttaaaatcattaaaccacatttatgtttgttctttcataattttttcgttcatttctgataaatggaaggctttgaccacacagagataggtttacggaacttcactttcgcgcaaagttccatgaacttttgctaatggtgttaacaaggctttctcaaaaaatgtgtccagcacgagtaaacgcgccttatgcacccctccccccctccggcacgtttacttgatggtttttatgggcgacggcaaactgccacccgggtggcagttttcaagaaatttgtatgaaaactgccacccgtataaatttgaaaactgccaccggtagtgaaaactgccacccgtgtaaatttgacaactgccacccacatgaatttcggcgcacagagggtcgaagcggtattatgggaagactgattgtgaatctcaagccaggagaagtagngaatttttttaacaattacagtgcagccgaaagcgtcaagcgtaacgaaggtatttctcgcgaagcgcaatgagttcgcccgctgagttggaatcccaaacatgattttcttaaatcgagcaattttaaattaatacagtttttttgggagtcgtgtttttgaaatttagaggttttcaatttttcaatttttttttttattttaagtcattgcttctagggtaataccttctacggcgtggggcggaatagattatactccacgccaaattgatggatatcgacggtgtaggtaagtccttaaccacgtatctcgtttgcggtgtttgaaaatctccattcctattttattccttttttatttttaaaagagagcaaatcgacatcgtccctggaaatgttcgcagaattttcttcgcaacgagaagaaaaatcacgggcgtttttcagaattgctgttgagtacttttcaatttgaaaaatgaagtgtgataggaaatctgctacgttgcaaaccaagatacgtagtggcggacttacaccgtcgatataattcgtatttcactcccgcattttccgatgaaatagggatccaaaatcttacttccctcataacttcatcacagggttgccacagaatttaaaaaatgaatttccttgacacattttggtgaaaatctccaataattccagatataccagatggtgcaaaaacataatttgaaatagttttcggggaaattttttgttcgaaaagtcaaacccattacagtaagcgaagaaaggtgacttgtcactngcagttgtcaaatttacacggggggcagttgtcaagtcgggtggcagttttcaaatatatacggggggcagttgtccatgtttccaggaaatgggtggcagtttacagcctcccggtttttattgatgtttcaaaacgaatgagaagggggcggcaaaatacaggcggcccattatgggcggcaagtacctaggtaaatccggccctgtacagaaacaaacttaaaatttcagttgaacgcagcatttcattcaggcctacggcccctgcggcgttgtgtagaaaaactgcagctgatattccgagaatttttttaacaatttcattgcagccgaaaccgtcaagcgtaacgaagtgttttctcgcgaagcgcaatgagttcgtccgctgagttgaaattccaaaaatgattttcttaaatcgagcaattttaaattaatacagttttttggggaatcgtgtttttgaaatttagaggtttttcaatttttttcaatttttttttttttaagtcattgcttctagggtaataccttctacggcgtgggacggaatagattatactccacgccaaattgatggatatcgacggtgtaggtaagtccttaaccacgtatctcttttgcggtgtttgaaaatctccattcctattttattccttttttatttttaaaagagagcgaatcgatatcgtcccttgaaattttcgcagaattttcttcgcgacgagaagaaaaatcacggtcgtttttcggaattgctgttgagtacttttcaatttgaaaaatgaagtgtgataggaaatctgcgacgtcgcaaaccaagatacgtagtggcgaacttacaccgtcgatataatccgtatttcactcctgaattttccgatgaaatagggatccaaaatcttacttccctcataacttcatcacagggttgccacagaatttaaaaaatgaatttccttgacacattttggtaaacatctccaataattgcagatataccagatggtacaaaaacataatttgaaatagttttcggggaaattttttgttcgaaaagtcaaacccattacagtaagcgaagaaaggtgacttgtcacttgtccctgacactttcgtcattttctctgactttttgaaattccctgacatttccagtggcgtggcatgaattgcgatgtatcgattgttttgccattcaaacgtatgttggagaatcgattattaaggtgttcgctgcgaacaccctgttcatcgatccttttccataggtttaaatgacataacaatcgatatatcgcaaagaacgccacgccgcactggacatttcccggtattccctgactgtggcactcctgccattattttcatttcccaagttgcagtgatcgcgatgaatagcgattttatcggtggcaatatatcgagaaattatcgcattaaaaattgcgatatacggcgataaaatcgctacacatcgcaattttttgtttgataaaatcgcgatcaatttccgtcgataaaatcgagattacctaaatcgccatttatcgcgatttttgtttcggcaatatcgcgataaattgtcgggcgataaaagcgcgatttttttgcgataatagctcagatgtcgatgatcctggcgattttatcgccgatcaaatcgcaatatatcgtcaccttccaggcacagtatcacaagcgccatgcgacgtttaaaaatttccgccgccattttatttctttactgagaaattgttggttgaatctgtttggaaatttcactaaattttatcggcagcacaaagaaaattcagtgaaattttcggacagcttcgttgaacaatttctctgtaaaaaaataaaatggcggcggaaatttttgaacgtcgcatggcgctcgtgatactttgcctggaaggtgacgatatagcgatttttccgttgagaaatgctacttgcgttaatttcatgattactccttccttttctagaaatgctctctacgctggcgtgtgttgcccagacgacacggcatcaaagactttatcgactcgccagattttatcacgggagagcccaatcgattcgaggatcgtcaacagcgcgcaatcaaatctcgcccaatcgaatcgtgagtatagtttgcaagttacttttagaagactaacactatgatcagtgagaagcatattcggcaatcagtttgacaaacaaagttcggttggatgttgaacagtctcgcgaaaaagtcccaaatttgcctcatacctacattgatcattgggaataattttattcaaccatcaattatatattataacagaaaattgctaaaaaagaaagaaaaataaagtctggtccaacaaacctaagtgggttgcggttgggtgtcgcagagtgcacagaagcgctttaagagcgacacgcagtagtggtagtagtagtagtagtagtagtagtagtagtagtacacggaaaaaaataggttgtctctaacagctaatgcggtatggttgaaaagtaaaaagccgtgagaaccaacaaaaatagttggattcaccagccacgttgaccgatgtgaccaagcacgaatccaatttacctatacgcctaaattaaatccgactgttgcatcttttagtggtgcaaccagcaatgtatgttatcataccctcacaagtaggccaagccagcaagaatcttacggcggatgtcactgtggctgagatggacggattaaccatcttgacaaagctgaactggccatcacaaaggcgacccaaccatcaggtactgtcagcgcggtgagagttcccgcctggctaagctgcggtccgccatttttcttttgtcacacagttacgagttcatcacgttgttgttcggagtctgtgcgcttggctttatttatctatattaatccatgtgaatttacgcgtaatttgcccaaattcgtgttcgaatcgtttctacagctaccgtcttctctttaaatctatctgttttaactttccacgcatattttccgagatttcctagttacctgtatcgaccactttttggaggttataagagatgctgcgatgaatctggctaacaaaatgtgtgaattctgaaaacttgaagggcgtttcgcaaaattgttctcttatttagtgagtgtcggttctgtataaagtcattgcgaaagcgggaagatacggaagtcccttgaaaatgatagaccagtgattattgaatacttcgttcgtatatatatttgtgttaaaattttagagaatcaaaatactctgatgcagagtaaaattttcctgggatatttgttgaatataagctttaataaaaatttgacagtttctgtcccaccgtgaactgtggcaattggtactgcgtgtagtttatcttttaggttttttttgaactatctatctacttattatgaaatcaaactttttgtgaaactgatttagtctgtaaatgattctttgacggtaaaaacaagtttcgttttggtatcatttacttgaaatcggtgaagcaattatctgctatttctcgtcaaatttgctttaactgccagtaattgtatgtgcaccggaatttttaatcaaaaagtaagtaaaatatctactactttcatatcaaatttgtttctgataatttgagttaatatttaaaaatatatgttgagtggatgttagaatccataaagttcgtcggagcatatggaattcgggaagcttgaaattaccatactacgcagtcggaaacgccacactagcatggtgtcagccgtatcgtgtaatttacaatactggtatattggtaactaactaaactgcgcagcttcatcggaaaaaaagcaagaagacagcacggttaataataaccaaacactggtaaatccgatcattttttttttgtagcgtgtgtagtagaaataaaaagtataataaagaaaaaaacaggctgtgcgatttaaagaaatgaaacaaatgatcacaaatacaaatctagattcgaattcagttatcaaactcaagcagatcgacgttgacggttaaatatagattttttgtgctccttcatcatcggtcgtcatagctcaatcgttagggtgttaggttaggattaggtaggtccaggttcaatcccaaataatgggttgaaaaaattctatcgtagtaaaataagttgagtaaattaacaaatttcatatttttcatttttacaatttagcgttctcagatatttattttacggggctcctggccccctattttccattaaaagccccgaaaaattgtggcaatgaccgctgtccattttggcaaaactaagcgggcatggtagccctcaaaatgggtcactttgacataattgctgagcgctgcggccgagcgctcgggttgatctaaccatctccgcagggctgacccagccgcgcggcatgaaggcagcgtcactacctgctggttgtcgatctagccaacaatttggttggcgcggttttcagctttcgaagatggtcgaatcgaccatcttcatggctgcacgagacaaccttttttttccgtgtagtagtagtagtagtagtagtagtagtagtagtagtagtagtagtagtagtagtagcagtagtagtaatagtagtaatagtaatagtgaataggactcttgtatgatcgaagtttctccgctttcaaaattcccttagacttttcaaggttcttgaagataaaacttcctgacttttctctgccttcaatttatttttcggggggctataaaaattattttcaaaaggttccgcagccaaatttcctgacttttctaggtttagtcttgactttttaagaactaaccaccctgtccaaactcaagtcgaactgatcaaacaattcgaactcctcgtcgaacggctttacatcttgaagacttggctgcctggctatcctcgtccccgagtattgtcccttgaaaactcctaaagacgtcacaaaagaaggaattaaggcgcccgatatgagtagacacagctcccaattcattccacctatgaaatcgcactaaacacgcgtgcagaaaaccgctgtcgcgtatactgccgtgctaagaaagaacgccgtacgaacattcgatagttgccaaattgccccctcagaatgtttctttttggaggaaagttgtgaatattttctcttgcaattttcagacagtttatatcagactgctagtagaattctctgaaaatttggaggaaaaatgttgtcatacttcccggaaaattcgtattttaccagatgaaacttggcaacgtctaagggttcatacggcgttcggcacggcagtataattccgggctaagattgccttaaatcgcgagcccttcgatgcgtcgataatatctggatctgaatttcatgaagaactctggactggatcgctgttgttctaagacgtttcccagaggccataaaataaagagttccgtagcgaccggatcgcctgattcgagcaattgtgtttcagaaataatacgttgtcaggcccggctgtgttcggtatagtgcgacgccctggtaaaaattggcgatgagagctgcgtttcaaaataccataggaattcttatagccggctaaagaaggctacagaaaatcatatggctggctgtagaatgcggagaaaatcattaggccgggctatacgaagcgataaaaaatcatgcagccgggctatagttcctatcgccgggctttacactttatcgcctggctgttgctttttcgcaatcgattatgaaaggctatgagaaattgtgtagaaattcgtgtgctttggaaatgattaagtttgatacggaaccaccttaatatttacaaaacacacattatatttccctttaacacatatttttttttcatcaattaaaatgagaataatccatacaggttgtgcaaacatttcaaaatcgtgagttgaataacgctgactccgccagattaaatattagagcctaacacaaagcggagcggcgacgcactggcgcctacaaacctaacagggatacttcacgcattgcgcaacgcgtgaagtatccctgttaggtttgtaggcgccaatgcgcgtttcgcgctggctgctcgcctgccgcaacgcagcgtgccacggcgcttgaagcaactatttcacaccagaggtattgcacagtattatacgaaactgaaggcgctctaatatattaggaatggcaggcatccatcaaaagtacggagctttcctcgcaaaataaatcaagatactacggcccaaaaagagagcagtacttattccaaaaactcactaagacctagcatccgtaattagtaacgtttagcatacactttatcgcctggctgttgattaatcgccatcggctataaaaggctataagcaattgtgtagccggctaaagaagctattggaaatcttacagcctgctgtgcgtctatggtattttggaacacagattctattgccaatttttaccagggcgctgtcacagtaccaagatgagatgaccaaaatgacatagatgaaaaaaaatccggaccttcttgcggaatttccgcactttttcagtactgccggactgccattaaaaatcagtaccattccggactttccggacttgtagataccctgtggtgaaataacgttaacctctgttggtatcttttcactcaactcgttgggtttggtgttacagtttgtggtagcaatgggaaaaaaacagacagaataaatgcaggagaggctaactacaacgactggccatggatggtcgccctcatgcagtacaagaaattcaagaggtcgtgggttcacttctgtggcgccgtcctcatcacagaaacacacgtcatcagtgctgcacactgcttcaatacgtaagttggtggtatgcaacggggtatacgcggaacggcccttggccgccacgcgacccaacccctagtctgcctcactagggaatagagtccctttatacccagagttaagacaactcacttttggttcggctgaaagtggcctaaaaaaaatccaattctgattggttctcgctcatggaggccgaaacgagtgcaccaagatggcggtacctcgaatgtgaacaagaataatgaaaatatcacctaattgtggtttatcaagattaaattgtcatttccatcggtccaaaatgaaaagagaataagaaattattcacaaaccaatctcattttctttttaattgatcaatttgttgatgttgttgtttttgtgtgacagacatcgcaggattcctgatccttatccctcaatatcgttcgtttgggtgcactcgtttcggcctccatggccagccaaggccggctgccagtcagctgataatcgagttgtcttaactctgggtataaagggactctactagggaagaacgccgtttgaaccttcaggcgttgccaaatttcctttgattaaacacgaatttcctggcaaacttctatctatatggcaaactatttttctgccaatttttcagttaattttgctcgcaattcgaccgaaaagttcagaaaatgtcataactgtcataaaaagggaaaatactcataactttcctcaaaaaggaacatttcatcgaaggaaatttgacaactctcgaatgttcatatggcgttcttccttagcacggtagtagtgttgttgattttttttttcgatatttggaagagatcgcgatcttctgcacaaaataatcgattgaatcgaatcgattttttactcacaaaaagacatttttcaattttttacgaacataaattttactcctgaataattagggaggcagctagtaagtctacattattctttaaaactaaaggaagtcgttgacattgctccggttcaagggacaataaaacttaacgcttagtgaggcgagactttaggaaaaacgaacggcacaatactttttctggaaatcgatttttttacagtacgatcgattttcttgaaaatagctttttcggtcctaatttttctgcgaataatcgatgttttgacgaaatcggtatcttcgatttaatcgatttttgatgggaaaatcaaaatttcgattcaatcgattttgggggaaaatcgatattttcggttaaatcgattcttggggaaaaaatcaacagcactacatcccccaaagggcacttcttgccctcccgtaggtcaattggactacattttgcaattaggaactataatttctggctcagtttagaaacaacgtatgcactatcagttttctttatgcacttacgtctttttacagataagccaggtattatagttccgaattgtaaaatgtagtccaattgaaatacagcgagctcatctgaggaatagcttctcctgtaagaataaaaaattatgaaaatcggcccggtacgcaaagtagcattttcaacggaaaaatcatgcatgatattttgaaattaagttgcgatttttttttttacgaatttttggcggttaaatcgctaggatcatcaacatctaagtaagtgacaatcctcaatcttggggcaattttatgtctctacaattgcatttatccaaattatatctcgatttatcacgattttttgctcgatggtattgcgataagttgccgtcgataaaatcgcgattttattgcaaaatgcgatgaaatcgcagttctcgatgaatcgacgatcgataaaatcgcaatacgttctccgatcaaatcgcaacttatagcaatacactgctacttgggtagatctttagaacaaaatgtgaacttttacgtacattgttaaaatggaagaactacaactaactttatcacgtaacataaaataaaaaagccttggtaatattttcaaaatctgacgaatagagcgggctgatttaggggctatcgcgtgtcaatagccgcaaaagtcgtgaaaattaatccatcagtcgaacgaactgtgagaaaaaaatgaaaatttagagtgttggagagccaagagcagggttgcacgggtgaaatgaaaaatacgaagtattgaaaatttccgtaaaatatttcatgaaattccacaaaattgtgaaaaatatgaaacatatgctcaggagctgggtatgcaacacgcactaaaaaaaccaaaaagcaaaaaccagtcgccttttatttaattttgcatttaatttcgaaaaatatttatctgaaatttcacgaaatatttcacacggttctaggtttctttttcatgaaaaattgcaactctggctaagagcttgcggtaaatacgggtaggtcatcgctgttagggattggttggaagactaccaatcgcagggcggtaaagcagccgcgagagcaaggcggagctacgtgtttgaaagagtggcgggaaattcaatttgacgggcctcgtccagaggtgcgacagagcacaggggagaatggagatgttgcgtgtgtgaggaatttgcgatttgactgttgattcttctgtaaaagttcgcgaaaaacaagatggtgccactggttttctctgaaatcaactcccaagctcaaaaaaactctcaagttgaggccaaaatcgaggggatatcccacgctatcctgagagtccacctctacatcaagacaatctctccatgcaaagatagggggcaaatacattgacagggctgccactttatttggggactccaaaactgaaaacacggcatcactgctaatgtatttgcttccaatctttgcatggagagtttgtcttgatgtagaggtggactctcagagtagggtgggatatcccctccattttggcctcaacttgagagctgtttttgagcttcagagttgatttcagagaaaaccagtggcaccatcgtgtttctcgcgaacttttacataagaatcaatggtcaaatcgcaaatccctcacacatgcaacatctccctttcattccattttctccatttttccgtccgcagcgcgcatggcgcacgacccgcgcctccataataacgcatcatctagcgttgagagttcactgattacttcacacgatcagtatgtaattttaaaagtcgaaaattataaacaattaaacaaagaaaaaactttacacgatacacgaggttctctgccaggaagctctccccgcctgaaatcggtcaccgcccgcccgccggcgtgcagccagcgcgaaccgcgctccggacgcctacaaacctaaggggatacttcaagcattgcgcaatgcgtgaagtatccccttaggtttgtaggcgtcagtgggcgttgcgagctagcagaacgtcgcgccgcgccgcagcgtgccataaaattcgtaggcaatttgacgtcaaattcgaaattagcgactcaagacacatctgttttcatgatctttcagtcattatccgacttatttcttcctattcttgagttttggaccatagtgcgccgcagacggcggtgctcatgaaattctcccctgtgctcaatcgccagaggtgcgcagttggctgcgaatttttgcggaacctataattggaccatattttgcattaaagaatatggtaagaggaaataaggatttatggaattaggtaatttggtaatgcctgaatgttcatacaacgtttttcttagcacagcagcataacagtgattccttgagcaaaactcaaccctgcaaacattttcagactgaaatggcaggacattatggtacgaataggggcttacaatttcaaaaaggcaaatgaattcccttacactgactacaaggtaagagcggcgaaaatccatgaagattacgataaagctacaaatgagaatgacttaattatactaagcttggaacgtccggtcaagttcaacaagatggtgcggccagtttgcctgccgagccctcagtcggaagatgttaccacgctcgtcaatcgaactgctgttgtcgcaggtgtgtatataaaaattctaaattccacactcaatacaaaagattgggcgcgaaagtcctgtgaaaggttagtaacaaggagtggaggaggtgatcaggaggtgtcaactacctatgatctggggcagaatatgagtcaagggcgattggatgtcgcagagcgcaaaactgcattgtaaaagcagctgttatatatatatacttcgcaaattagtcaaatcaagtattttatgaaatgcctggagagaaattgtttgaatttatgatggaaaaagggttttcagtattttggtatcccacactagtgacaattactgtcaccagcgtcacaagaaaaatagaaatgtacttgcagtaaaccatattatacatcaaaagttaaaaaaaaaggttaaaaagaaaatttctttgaagaattacctttcagctgagatcagtgataatctatgataaatgtatatgatttataatgaactttcataatggatgttagtatagtttgaatttctaacagaggatatgttaacttttcctcagaagtaaatgcagagagactctagggcaggacagaattttgacaacagttgttaactttcctgaattttacttcacgttttccaggttggggtgccacatctttcgggggaccagccagcagcaccctgctagaagtaagtgttcctatttgggagcatgaattctgcaaaggccagttgacgcaagtgatccacgatacaactatatgtgcgagtgcctatgaaggaggcagggatgcttgtcaggtaaaaaatttgagttgagaccaagatgtcttcctcgcatagagttgtaggcattaattgcaagaaatcttggcgatgagttatatgtcacttcgctacatttggagcaataatttcggactttcttctagcgttctaaggaacatccacacaggaaagcttttcgaaggtggttaaaactgatgtgcttcaacaagcaagttgaggacgattttgaaatcaaatcaagcagcctaagcgagcaaaatacagtgaaattaggcaagctttcttttgatttttaaaactgacccttgaattttcttgatttgaaaaaaatggaacttcaaggaaaaaaccatggtttatggatggtaatgtttttggcgaaccacaggagtgaaacggaacatgtagtttgtaagagttaacccttcgcgactaaaaaaagttttctagcctctgcatcaagtcataactttatttggaccgcattgaacagagaggaaccaagccacaacagctattgcaaagtttaacagagaaattcacatttatacaagagaacgttcatgcagattcctttgaaaattttaggaaatttgcttcttactacgcaaaaaattcagtgaaacttgcccaaaaatccgcacgaccgtttttgcgtaaaaaattaaattgccaaattaaagttggcaacagtagcctttgtgacttggttcctttctgcttaacatagtccatttaattccaaggattttttgagaaataatgcaagaaatatgagcacatcaacgaaatagttaaaacaccaccagttttctaagaggaaccagacacaacaatcaataccacaggattagttacgcgagccttactgaacgacccgatagagcgctaagtttaatgtctggtggggactgtcttgaaaatggagtacagaaattattttgtttgattagatggtacaatcagcacaattaaaatttgcatctttctctccactttagatgaaattccatgactgtttaacgattgctttcggagaccgaaaattcccctactcttctaggttttcatgataatacagtcataatttttttatcgcagggagactcgggtggtcctctctttttccagcgtactgatggaagatggacatcaattggtgttgtgtcttggggagttggttgcgcagcaaaaggaaaacctggagtgtacactcgccttacaagctacctgccttggattgctcaggcccaaaaagaaatgggagtgttcaccagttga

SEQ ID NO: 34 - DNA, 22138 bp, Bemisia tabaci
  source 1..22138: mol_type = genomic DNA
gcggcactaagatcattttttactgaccgcctttggtgccgcgaggtcgtcttaacggatagtgtccagattttgcagcatcctatggtgctcttttcttaattttttaagtgccgattcgatttactgataattactgcgcacgtccgtcttttcgggttggaagaacccaagtgtcctcagagttttgtggatttgacgatctcgttcaagtaactctgatgatcggtcaaatccaaagatacagtatatgctccttacattgattctttcgttggaataagactttattttcgtaaatttttcttcgacgatcttggtgtgatttgtttctaaaaatccgactgtgaattgatcagaaagatgtattattgttcgtgttgataagcggagcataggaattttctcttgaggacggtgagtgtactgtttttcttcttgttctttttcctcctcccttgtcacaaacagagcaaaaaattcgtggtaatacaaatcctctagccccccccccccaaacccgcgacataggattacgaaaatattttctcaatgtaatgcctgaaggtggaggagtctttgaagaaccttgagcattaccagagcattgtctaaaatctctattgtcactcaatttagaaaattcatctgttactccattttagatagagaaataagatgattaggtatacgcaggcgtacgctacatcgttatttgaccagtagcgtagaggaaatatcttactgattttaataaattcacgtaatacgagtagagtttcatcattaaaacttttttcatgagtttgatgaaaggttttcgtggaccaccatcattgagataaaagagacagtaaataacacgtggcatttcccccgttttagaagttatttgcgaaatactctggaatggcaacaaattagttggacgcgattataacgcgatatgacagtgactaaactttaaaaatttggtgcagcagtcgattaactaaaataccaatgctgcatccaaatgatttttttaaactacttgagtgaggtaatatgggtctattctctaatccaatactttaaatgatactttttcgaaaagataaagaacaaaagtaatattcaatcaaaatctccacatcaaacttatactcagattattttttccttatctacatccatatccacgtgtccaatcagggtaagctatggtggatatggatagaactgtgtgccctctacattcagaacttgacagctgaaggtggaagaatttaacgcaccgagaatgctgttcgctggctaaatttctgaataagaaaccactatctctgactaattttagaaacatcatatgtgccatcagtttccatatgcaggaagtattattttaatggttgagccagaaatagtggttcaatactgcaaagtgtagttcagtcaacgtcatcgacatgtcaatggctataatgtagaaaaatacgtatctccattgcaacgtttaaaaatctccaattttattttgattttttattctacatgtgttttttccagaatggaactgactaagatatctcctttttatattctgagaatatttttgaacgagcgaagaagatttacaggaaatttcaaaattaagtatctgttacttttctatttaaatggattaaaacattatctgagatttgcgacgctgtaatcagagttacgcatttttcgactttagccgttgatttttaacccagcgcaatggcttcaagagtgaggagtgagcctgggttaagctccaaacttccgagctcagtgttgggaaatgcctgattagtgctgagaaggggacggaaatgagcaggaaatcgaactgattatcttcggatactgttcttctttttcctgttttccggtaaatttctaatcttcaactttggaacggttgattaagatatacgtcatcgggacgcggaactataactttaaattagtcacgtgcctctgtattcctagagcactcgctgttgaaatgggcgaggccaaatgaggtcccatccgtgaacggagaaaaattttgctcaccgaaatttattatttgctcaccaatatgattttttaaggagaaatttttcctcctccgagatgcagctgtagaaatcaacactttaaacctacgcaatggcccaagtgcaaaaatttctttaaaatgccttaaatttattagtgatatacaaagttcataaaatgttgaggacaaatttttcctcatgcgatttttgttcgatgctctgaaagcggcttataggttattgatgatggaaaactaaaaaaaaaaaataaaaaaaataaaaaaaactaaaaaaaaaataaaaaaaaagtattaattgaaaaaaattcagacctcacgaccgcatatcatgacctcgtaattgaaacaagaggaattattgagagatgagtttggaaagaaacgaaagtaattgtagaaattatagcaatgtcttccttagtatattcatgtagactgtaataaaaaagcggaaagtatgttctcatttgcaaaaggtctgagggcaatattgtagtgataaaaaggattatataaactatctaatatgtacctcacaaattaacttgctctcgtgtagcattacctacatacgatcattttattaactgagaaaaaatagtctttgccctccaattatcagctcattttgtatcaacgtttttatgatacttctaaagaaacaagtcacgctgggacggaaaaacgtataagtatcagctaaataattttaaaattatgataattctttaaaattttatctataatttgcaattttgagttttctgaaaggtttcctttatatttgggggaaaatgctttcagcgggtgttatatttggaattagtatgcaactcctagaccttttactcaaaaattcaacgtcattcaaacaaagaaaaatgtatgctcttgtcttttctcaataatatttttcgaggtacaaaataatggtcttcctaatggtaaagaaaattcgccaaaatcttcagtaacttaatcgcagattgtttaattgagctagctatgcaatcgtggaaatctttagtggctgtaggtaaacatacgaggttgcctatgtaaatgatattttggtttattaactcattttttaatccctcgttcactccaatcctaattcctccttccattctcacccttctttaaagggatttaaaaagcaatcctagacccctcctcctgctctcattaggcatctacgtaatgtcattcattgatggccctagggagaaatatcatgttaaaaaaagaagaaaaaaacaaaaaaaaacaaaaaactgagatttttttcacattcagtgatctgaaattagtttagtttgaccatcagcactacagggtattttgatcagtttctttttgttggtcagtgtacatgtgcaatgaaaaggagcaatttcagtcaagtagaaagcgttatctcacagcaatatcgttcattttgaattattcaatctcagacctttgcacgtgcggtagatattgagacttttgtcagataaaataagaccgttgtcagcaaccaaaattggcggtaactgaacgtgacaggtcaaagtacttacgtgaagtatacctattctctcgagtaatatcaaataagcttttcaatattttaagacagcgtttctaaaaacaagcattttgagtagatatttttgtagaaaatttttatgggtttgcgaaggtattttcagtattaaaaagattcaacaaaaaaactgattgctactttatttacaggctgcacgtggtctcaaaaccaagatgctcaatcacacaggaagtttgttattgcaaacaatgctgtatttggcaaactcggaattctcatctctggaattggacaacggaacagttttacaaccacaaactggtgattattcattgaaaatatccttcagtaaaacttaaggggcctctaaataaattagcttaagaggaagcgtattttattatttacgaaccgatagtgtggaaaatgctggtatctcattaatgagttagatttattggaattatgtaataattttaccgtaatttggacgaaatttccatttgaattataagtattaaatatcatgcatgtacctatatacatacacacatgtacctataatgtgttacagtttaatcatgcactgatggtttaccggtgctttgcacggagcgctaagtagggaatattatatgtagttaattttttaaatacaactaaatagtaaagatgagtaaatgaaaaaacgtacaacaaccgcacgaaaccccaggagcacacgttgattattgtaattgcgtccgtctcttattctattaagttcgccttcaaaacccgtgatggcaatatgattgacttaaggaacatgaccagttgcgcgcaataatttagtcagttttgcgctgttcagtccatgcatgaagacacattgattagtcaaaatcaaagattttcttaccgcaaaccaatttttgcttagcttattccgaaaaacggctccactcaggatacaggctaacaataagttaaaccgcgcttagcagaaaggaaccaagccacatcagctactgccttaagccgggcactttaattttttttttttacaaaagaacatttgtgcagattccttcaaacattttgaggaatttgcgcagtattatgcaggaaatttactgacatttgcacaaaaatccgcacaactgtttttatgtgaaacattaaatagagaatttgcaggtgtctgaaatttgaatgaacttcgtgtttaagtggaaaccactgagtgaaataaatacgaagatacccttagtccatgaattaaacaattattggagaagatatgacacaattatctaatctgctaaaatacgtgtatttaaatgggaaatgccgccagatgacgtcactaggtggaacattttttcacttttaaatctatttttattcgatttccatatcagaaaaaaattgtaaaaaatactgtgaaatcagctctttaagcacttttagatgaagcaacaaaacatttgcgcgcaaactctccattgcccgattaaaaatttggcaatagctgatgtgggtggttcctttctgcttaacgttgtccagtcgagggatcggcgcaacttagctcatcatttgtcatacctatttctagacgtaacggcaaaatgctacggcgagtacgggtgttactcgataaactacccttggagtgatattctgagaccagtggcgcagtttcctgaatcgccggaaaaagtaaaccccaagtactgcctatacactcgacgcaacgccgactcgtgcgagctcttagaccacaaggatccacttacgatgtacaagtcttatctcgtccctacacatcgcatttacttcatagctcatggattcttggagagtggggacaggccttggataaaggtgggtagttttcaatattttcagctcaaaccaagagtgagcctcctcacgcttagaaaagtaaacaaataaaaataatgaaataataaacatacagggccggatttacctacttgtcgctcgggggccgcctgtattttgccgcccccttcttattcgttctgaaacatcaataaaaaccatcaagtgaacgtgccggaaggtgaggggcgcataagacgcatctactcatgttggacacattttttgcggaagccctgtcaacattaccggcaaaagttcccggaactttgcgcgagagttaagttccgtaaacctatctctgtgcggacaaagccttccatttataagaaattaacaaacaaaaattatgtaagaacaaacataaatgtggtttattcatttgaacttccgccgccgcgccgcgctgaccacactgtgtttggcgcaatgcgtggagtattcatccagtcttgtgggcgccatgcgtttcacgctgactgcaccgcgtttgatgcaatgcgtgaagcattcatgcagtcttgtaggcgctaagcgtttcacgtcgaccgctgctgaccgcactgtgtttgacgcaatgcgtgaagtattcatgcagtcttgtaggcgctaatatgtgttacgagccgaccgccgcgtcgagggcttctccttttcatttcaagtcctcgtcatcattgctctctgcgccgcgccgctccaggccgaattgcgttagaaattactttacactcaggagttgagagattttgtcgtcatttctcgtttgtaattttttttctgaatctgattttttttacctgcatttagaagaaatgcaaaatttaccgcctcctaaatttgccgccatgggccgcggcccatgtggccaccccctacatccggccctgtaaacatatactaaaaaaccaaatgcaacagcagggtattcatgttgacattttgtgcgataacagtacacttcgttacctcctcacgcacgttaccggaatccgcaaatcgttattaaagaggccaaatggaacggatcaaggcggggtcgagactaaacacacgggtgtgtttttggcgacgaccatttaaatttgttgactaaatgtccaaataaacaatttgtgtgttcaaaggctgattttaatagagcgtcggtactgcataagcaaaacgtaaataataacaattcggctgtaaattaatatcactcatgatttggtatatgaaaacttttttttggtcctttattatcaacaactattcacagaaattgacagaaatgaaattacatttgcattggatttgaaaaaaaataagacgcagaaattgaattgtatgcaaaaacaggacttggaaatgaacgaatgaaaacataaattagctttactgagttagtacccagtggaaaggacgctggaaatgcctcgaatgggcacaccattgctgggatatgaaagcttagataacctcacgactgtatcgagagattttgagctacacgaatttacatcgatgttcaaggccttccgtgggtgagcttgattttaaatacttaaattacatgtaccaccacacaaagtgatgataacaaaattttataaatttcagaaactgacaaaagcgctgttacacaaaggagatgtgaatgtaattacggtggattggggatcagggtcgatgcccccgtatgcgcaagcggtggctaacatcagactggttggaaggatcactgctcatctcatccagacaatgagagtaagatcattttattttcgcaactctaattggaagtaattagtccgctttgtcgcttaactcggctgaagagcaagacacaagtagttctgagtatcgccgacgagttagcctactcaccatctttaacaggggcggcatttcttttgtattgaccccatgaaatattcaaagttataagctaaaacaaactagccttagacttatccaaaaatactttgaagattattattttgaaaaccgacggcttaaggtgattcgacggttgccatttttatcgtcagagcgacatgcgatatatcgcatcaattcgttccataatttcagctacttgtcattttttccgaatttttagatcgcacttctgttgtcccgagactaaagaattcatgtgccaaatttgacaaagaaattcaatgtattggatgcatggtttttttttttcagaggaaaaatatcgctttcgagtgcagtttcgatgtcagtatcgaatgcaatatttttcctctaaaaataaccctgcctccaatagattgcatttctttgtcaaatttggcacatgaattctttagtctcatgacaacagaagtgcgatctcaaaattcgaaaaaaatgacaagtagctaaacttatggaataaattgatgcgatatatcgcacgtcgctttgccactaaaagtggcaaccgtcgaatcaccttaagctacaccccaaaaaattcaagagtttctaggctgtaagtaacgggtattttgactttaccaattttaattctttcataaaattttctcttgctctgacttgcatgcataggatcaagtcgtggtagattgtgttaggtactcgtataatcccactcgcaaatgctttggatacactgaactcagttgcgggtagaaaatggaggaaagaaaagaaaattgtttacgaaaaaaaaaaaaaaattaagccgcaccttatctagtggtcaattgattatcagcgcaaggccattgaattttcttttgaaattcgtcagaagtcgactaaaaaaagacgtaacattaacaattggaccgcgttaagtagaaaggaacgaagccgcaccagccatcgggcaatttaagtttttacgtgaaaacgtttgtgcagatttgtgtgcaaacagtgaattttctacgtagtgcgaagcaaattctttaaaactttcaaagaaatccacgcaaacgtcctctcgtaaaaagttaattgcccagctaaatttggcaatagctgacgcggcttggttccttcctgctaaacgcggtccaattttaaaatcatgctttgatgatacgtctctaatgaacactttagagtacctatattgagagagtatggccactggagttaccacctctgattggctcagccatcttaggctgaatggagcccttaggacccaaaaatggcggacgccataaagttaatgtaatgcaaaatgattcaaaatgtagttgtctttgcttatcgtaacgagaactttacccaaatgcactattgcgacttttttacatatttttaaggctaatcgtgtgcaatttttgagaaaaatgatctaagatgtagtaaggttggcagcaagtgcggttggtgataaccgtcaaaagttggcaatgaccccccccctcccatcctcaaaaaccaaaacaaagcaccgccatttttgggtcctaagcctctccattggacccagtggccatactctcttaatataggtactctagaacactttaggtgctttacttattttcgcgccttatctttttcactatccgcagaaagagttgggagttcgcgtggaatattgtcacataatcggacacagtttgggcggtcatttagccggttatgtgggtcatgctttgcaagagcagtttggtgtgaagttgggaagaatcaccggtctggatccagctgagccgcatttcagtcaaacagcccctgaagtcagactcgactctacggacgcctcatttgtcgatataatccatactgatgccacgcctttcatcaaaggaggttagttagataatcatactatgcaatcagccagcgagctgattattgaaatcgatagacaaagcgatagacaaagcgatagacaaagtgatacacaaagcgatagacaaagctgtagacaaagcgataaacaaagaagacagaatactatgcaatcagccagcgagctgattattgaaatcgatggacagagcgatagacaaagtgatagaaaaagtgatacacaaagcgatagacaaagctgtagacaaagcgataaacaaagaagacagaatactatgcaatcagccagcgagctgattattgaaatcgatagacaaagcgatagacaaagtgatagacaaagcgatagacaaagctgtagacaaagcgataaacaaagaagacagagaataaatgaagcgatcctattggtggaagcgtgtaggcaatacttacgaacggcaatccaccataacccctacagttagtccattagttagtcccttagttcttgatgatcgcctgtttgaaacatagagcacatggagtcgtaatataaatgggagagctggcgccatgttctggtcgaggagttccgggcccagtgtgcgccaagttttggtcactttttcggcccatgttcgatccaaaatggcggtgtggaatacgtagtaattccagtaattcctatcttccttgtttacattagatggccgagcccccgtgtatcgaaagcaatcgattgtgtatcgaagaagtgacccggcgtgacacaggagtctcgaaattcgggacctggaaaatgcttacaagtgacgccagcttacattacgactctaagtactctacggtttctaccagcaagatcgctctattttccctttgtcttctttgtctatagctttgtctatcaatttcaacaatcagcctagctcgcttccctacagctacgtccttcattgaaaagtgtcgctaacataagtaagctatcatatatcgacggtgaaacacccaaactacataggtatctcggtttgcgaagtttgcagacttcctgtcgtattttatttttcaaatggaagactactcaacggctatttttcaaaactgccgcatgagttttcttctccgtgcgaaggaaattctgtggaaactttaaggaatgttgttgattcgttcatctgtaaagaaataaaatgggagcggatattcttaaacaccttaaacgagatacctggcttgagagtttcaccgtcgttacacaaaaaaaaaaaaaaaaaaaaaaaaaaaaaaaaaaacaaaacaaaaaaaaacaccgtgatcttgctctgcagttgttgcggcctgcaatgtctgaacctagtaaaaattctggtactccctgcccgtgcgtttttggagggattttcaaaaacctgggaaaagcatcactacaagattgtaaatatgcggacaaattctgccgagtcttaaaaccataatatcggaacattttcaagatttttaattaaaagtataaggtaacaaaaaatagaaattctctcattttatcctcctcgaagctgaaatctcaaaaataaaatattatttgttgaccgcctagaattctttaaaatctaaaaaaacatttttggtcggatgcaagcatgtgtaggtgtgtgttttttaacttattttttagtgctattgacgtacaaatatgatgcgagccatgctgtttttattgcgatgcagacaaataggcactcttcaaaggtgtatctgacgcaaagcgcaagtttctttctcatactttttccgcgaaccatgaaagcgtaggtcccacgtgatacgtaactcagtgagtcaccgccagaaaaaatagatcgaatcgaaggatacagttggtaccttttggatacctcacttgttcacctcacctcttaaacccggaccacacttctgaaaaacaatttgctgaataaatcgtcttacgtatgtcattttcgtgcgaaacagtaatcggggtgcttttttctcacaggctcaatttttaaacactgaaaacactttataagacaatttatcattcagaagatcaaacatcattatacattttacatttttctctcgtgactttttttattaacttcatgcttgaggaaacccttgatgcagttccttttaattatccttcattgatatggattgcaaagtgttttttaaagactatctgcgaaaataatatacgctatgatactacggaactttgcccaatgacgttgtttctatggcaacgaacaaagttttacgatccacggtcgataccaaaattaacgaagaatgacccatttgaaaaggggtcttacagagctttgtggtttgcgcgagtaccattcctcgttgacggcacagtctgtgtcgctcagattgtgctcttaaattttgtgcgtatcccaatcgcacttaggacgttttaaaaaaattcagtgcaggtatcagctatgactatgactcgttggtttgcctaacactatccatttatcctcgtgcagagcaacagcaggggcgcgaccttggtaaaaattggcagtagaatttgtgttccaaaataccatagacctacagccggctgtaagatttccaatagcttctatacccggcaacacaatttcttatagccttttatagccgatggcgattattcaacagcctggcgataaagtgtatgctaaaccattacggatgctaggacttagtgagtttttggactaccgctctccttttgggccgtagtacctatcttgattaaatttgcgaggaaagctccgtacttttgaaggatgcctgccattcccaatatgttggagcgccttcaatttcgtatgatgtgcaatacctttggtgtgaaaaagttgcttcaagcgccgtggtacgctgcggtgcggcaggcgggcagccagcgctgaacgcgcattagcgccttcaaacctaacagggatacttcacgcattgcgcaatgcgtgaagtatccctgttaggtttgtaggcgtcggtgcgccgccgctccgctttttgttaggctctaatatttaatctcgcggagtcagcgtttttcaactcatgactttgaatgtttgcacactgtgtatggattattctcattttaattgatgaaaaaaaatatgtagtacaggaaaatataatgtgcgttttgtaaatattcaggcgattccgtacaaacttaaggatttacaaagcataagaatttctacacaattccttatagccttttatagccgatggcgaaaaagcaacagccaggcgatgaggtgtaaagcccggcgataggaactatagcccgactgtatacttttttatcgcttcgtgtagcccggccgtatgattttttccactttctacagccaactatatgattttctatcgccctctccagtcggctataagaactcctatggtattttgaaacgcagctcctatcgccaatttttaccagggggccggcagcggcaacttctttcattgcgataaagcctgtatacccaccgtttgacctgaatcagtaactttctacatgcggctacgatcgtttcatgttatctcattgcattatgcattacaatgatctgcgtcacttatggatcgaagatatacaatagacatattgctgttttatcattgtttcccatcaaatagagatagatagatagatagatagatagatagaatactttattttttatcctggggaggatttaacaaagggggttaggttgggagatcatttacaaacatgagattacttcattatgctctccctatctctaagattagcagggttaggttgccccgtcgaccgaatcggaagtgtgctcccgtgctcccggaattttaaaggtttcccatcaaatagaaaacgcccatcagccggaaatgacaaaagtatatgaaaaattaaaatagactaaatgtgttaaaaagtggggggaaaagtatctatgataaaaaagagaattcttcatgatcgcgcgttctttgagagccccaatttcgagctttgacctcaatcttctctcctattaataagcatttacttcagtatacaatggaaatcggatgcaacgaccccctagggaccggccaaattttgtcgttttatccgattcgatgcttaagaacattgaacaaatgggacttcaaccacggtgctgaccagatcgcaggtcgttaaaaccgatgtatccttataaacgaggtcgtagtattcgattttcactgtataaatgtctaattcttgcaattttataggtctcggaatggatgagcccatcggacatttggacttttatccaaacggaggtgaaagccaacctggttgtgatcagagcatgtcaaaattgataaatgatgagaagggcagttttttcaaaggtatgcacatgtaaatgcacttttatctgtgaaataatgtcgaccagagagtttctgtggtatatatctgttgtgattaattacatacgagaaagcgtgggtatgcgtgtctttaacggcatgacgtctcaatatgtgtgctctctcttcatttcttcgagagaaacttatcgaaatgtataaatgaaatttttagagaaattatagatactgagaggataaaaatcaagcgaaatctcttaaaatcggaaacggctgggtttcttgaatgcaaacaattgagtgatacctaaatgttggactgctaaaaaagctgaaactcgtggtttatattccgttttaacatttatcctggacggtaaacacgcaccaattattttttttaataactatgccgaaaaattctggttctattttctcaataaatttcaattcggtttcaatccgaagttatctaaccaaccactaatttagatattatatgttttaagtttttgactcctaattaaatacgcagagaaatccccttgtcatgaaaaaacttaagtaattaatgattttcccgctaaattaatccttcttgtttgtcgtttgaagccaaaatgcttttccaaaataataataatgaagaatcacgatgattttcttaaaatcatcgaattgaaaccccgccaactgcttttggcgtagcttatcaccttcagaaacgggtctcttccaccagaggcaatttactttttttttatttttttttatttctttattaagtgatgatatggatacataatttatattttaacaatattatatgagtcttaaagtctatcttattgactatcttaacaaagccccggtaccacctgttggtataatacgtcggggtatgagttgatttaggggcagagttgtttatattattactagttagtttgtacattttgatcttgtattctaaaatttctttataaggcaatttactttgatcttcattcacactcttacgctaactaattttgaactaattcaatgctttgcgaccaggtttgcgccgcttcctaaactgcgaccacgtgagaagctacgaatattttattgagaccgtcaatacggacccgcagtgctcatttcttgccgttgagtgcgagtcatgggaaaattatcttgcgggcaactgcttcggatgtgatcaggtacctattaaatgatatcttatcattgacttaacttcattcgctgtataataaactaagcagaagcgccgaattctgtgacggtcaatgcattttttataagagagatacgctacgattaaggtttgaattcattataaatccacgacggaaatcgcaaccacatccggaaaaaattaaaatgctaatttaaaaattcaattgctaaaaaaggtgactgcaacttttcaacgtagatattacaacaaaaaaatgctactttaaccgctattgtaagctaatttaaccacgggggtggctaaaatagcatttttgtgttgtaaaatctacattgaaacattgcagtttttttttgttttaggaattgaattgttaaatcagcaatttaacttttttccgtgcacgtaactcgtttgcggtgtttcaaaatcttcgtttctattttatttctttaaaagagaaaatatagccatcatctcttgaaattttcgccgaatgttcccggcagaagaatcacggtggttttcaagagccgctgtcaagtagttttccgataaagtataacaggaagtctgcaacgtcgcagaccgacatacgttttttgggacttttaccctcaaaatgagattcgcatggagctaacataaagctcaacatttaatgagaacaaaagaagctcgttttttaattaacttacaatattatcggacctcatgataattggagccgctacaatgaaactgacaggaaaaaaccaggtcatcaaccctaagcatagcattttccattctatttttacccctctcgactcctctcctcaatcatttcgtaaagagggaggtagcgtttttttctctactgaaagtggtggatagttttcagtgacacgctgaatattctatttcacctaggaacttctctataccttcatctatctttttcttctgcagttttttcacctaaaaagtaaactttatgattacagaaagatcgcatgtgtgcaacctttggttttaattcagttcactcgatacaaaaaattgctgccacaaggcactcgattgtaccaagtccgacaaggaaggaggtcaagctgtttttaatcacaaatagcaaagaaccattctgccgtaagtttctactatttccattgagattttgcattgtactaatgaatcctacataatcagtctggagggtttcatgtagaatagcattacaaatcatactgtacaatatagaatcattagaatacggcgtgacacgtaacgcctgaggtgcaaagtgcttgggtgggggggggggctgagctgcgaaacggtcaaggggcgcaccatctatagttttaagaataattggattgcatctagcaaaaaggaaccagcttaattacaaagtttccaaaatcgtgcgacttatttttttcttttaaaaatactaaataaatgcacagtatcagaatttacacagttatttcccttcaaaatcaacaattttttggtgagatgcaaaaacaatttgctttgctgggagagttttcagataactatgaagcggcaacatttcagtaacactgtaattgcgctggtgtctttttgctaaatgcggtcaaattaaaaggactgtaatattcaaactctggtaattatgcagaacttttgagcacgaaattgacgcgcagtaccatacttgaaagttgactaaaatggttctcctcctggtctaggctccatatagattgcgaactgtcctcaccagtcaaaaacgcctacagtttcgctcgatacttcacgacttacactagagttaaaatatttgcatcataaattaccgtgcagaattttcagttttttgaatattcattcatggaaacttaaaaagtgtaagcatcatataggtagttacttgagttgttttccacccgattccgtcgaaaaataagactaactgttggagttgataaaacatgataaattgcatctaaaccaaaattgatttcatcttaatcattattttgttgattttgtgtttcagaggctcaatataaggtcacagtcatgatatcgaactcaacccaaagtgtggaacatggaggcgagatagggctcttcgaaattgaaataatgggagctcttggtaaaaccaaatcaatcccactcttcaggtactttctcacaatgatttgaaattaatcaaagttaaattttttttttttttttttttttaaaggacttcaagggtcaaggcttcggataagttacttaatcagaccgataatatgtgcgtttgcaatttttggtaacaaaaagtagaataataagtagtttttcctcctttttttctatttaccgggaggaaaatatggccttagttgcactcattaccccttttcgtaccagaagaccgttgcgtatatgctatggagtgtggcagtggtaggttaaaacaattccgtggtgcagtgctgagaagaaaccctgtatacacctttgacagttgccaaatttctcctaaaaactgaatttgcttaaacactggtaaattaagctatcctctcggtgaaagtggatggttgcgatgggcaaagcaagtaataggcttattaacggtaaccaccatagacccagtaattagcccataattctcccccgtattccttaataatcatccgcttcaaccccttagttgtcttctttgtctgtcgcttcgtctatcaatttagacaagcagcccgaagattcatttaaccacgacagcacagcagcattgcacagttaaagccagcactaaaaaaaacaactcggagaaactttttcagtatgtaacatgatttcgcctaggagaccaaaaatacaacattttacgattgattgaattttttcatttcagggagcagtattataaacctggaggtacttataccggggtggtggcagatgtgaacgtgggacacctacagggggcaattcttcattggcagcatcgcaccacgttcaatatactaacctggcgattcgacaatgttgtcatttatgttaaccgagtcatcgttgaaagtttacatcccagtgaaaggtacggccttatctccattcagcagatatttcagacttaaacggacgaatttaaccagaaaactgaacatcgttccgccgtgaaacggtctgtgaattctctccagattatgaaataagaacttaataaattggaagtcagaattttgcaaatcatagaatctgaaaaaaaaactgaccgaaattcaagtagacctagcttgcgcccgttctaatacacgtgattttcaacgatcaggacgagctagtccgttttggatcgtgcatatgcccccttctattctaagttaagctaaagttataagaggatacaccatttttttgaccaaaaatctggcacaccgaaaaaaaagtgaaattgatttaacattctggatgtaaaaaaaagcgtgcgagaactcacaaaatgctgaattacccaatacagcagttagttttacatcctgacattgctgaagtaactgctgtagcgcggttaattcagcatttggtaagttctcgcacactttttttacatccagaatgttacatcaacttctctttttttttcggtgcaggccattccgataggccagatccaccatcacattgagccttactgcctcaatcttgcataacaattggactatattttgcaataaggaactaccattcctggccgcacatccattgaagcacctccctcaggaaactaatgacacatgtgttcgatcctcaaacgaaccgagagtgatgtttctctacagcgaaatatgtttcgttttaatgtctcgtctcctccgtgaaaaaccttatagcattactgttgtcaaaataattttgtgcttggacctacatttaccttaattcgcgcatgttcagccgcctcataatatgttccctcagaaaaatacaaatcaggggacatctgtgttcgctcagtgttttttttctggatctgggcatcaaattcataaatcagagccaaatgagcgaagaatcaactctacactctattattatgttgggattttaatttcaggcttgagctgtgtccagaaggtagcagtgttttagtgtccgggcgttcaacaaatctcaactcttgcgtattttcaccggagccagaagttaaagtgagctgagcttttgcgatgtagactgatgtgagtatgcgttcatgaattacccggcagggtcatcaagagaaaatataagaaagctattcaactacaggcacgtcctcccctttcaagacgattgtaaagccttgtgggaaagtgccgaggagaatcttggaaatcctcatttctcccgcgacacaatgtttcatttacgagttttttagatgagtacttttcacttctctgagttagaaaaaatgcgcgagaaataatttatctcggacgtttttccttgtctgcgcttctcaattcactgcctgctcaatgacactgatgaacactatatgaacagcaaccagcaagttgacctcaagacccttctctttctaggtatgaaggtgttacaacttaatatttcagtggccaaatcatcgcttcgcggcgacttcaataaaatgctgggttacaaacacgtagtcactgcgagcgccttcattttgtcatgtatgcaatttgatctctgagtgttcaaatatttccccgaggtcaaaacgcacgacccaaaaccgctcttgagtaaaattctcggattctctcaaagtaccctcgggtatgcaattttctctcctcgagatttcagattgaggcaaattcccggtaccagtaaaaaagtagtatcatttattttcagaagttggtggcaaaaatttgtaatcgttccaaaacatacccataagagttgcagatgaagtctcgcgaacggttttattatttcgaattctttcctccggtaagtcgatagaactgactttgagtgtaatgaatgttccaggcatcgagtcagcatcgtgctggtagacgcaaaatctgttggcgacgatttggctcttgttgacgtataataactcaaaagaactatatccatcgaatgatcgcaccatatcagccctttgctcgctggtcggactgatatggttcaaaaggcagcaaccccaagttacgggacttttttttaatggtggtcgtttccgatgaattgtctacattttcttaaaaaaaatatgcagctgagctggactgaatctactggaaaggaaaaaaatgaggaaggagttgagtttcgagtctaacttgcagcagaagtgtcaaatattgatgactccaccattccttaaaaataggtacgtaaattttgtgagtgccctaggttgaagattcgtgcttaataattaaatttatatttagaaaacaggtaactttttaacctggttatgttcctattaagtttaagtactagatacgtatttaatatccgtgtaaacaacttcttaaatagagtatattttactaattactgtaaggagtacccttaattgaacgagagattcagaataccagactattgaaaacgttcaagcttgagctggtggcagaatttatgtccattaaaaatttcctcttagatcataagattgggataatgaaccaaatattgtcctgtagggtcttaaccgagaagtttgaacttgatactctttttaggattttgtattttcgattttaaatattcctgtcatcctactgcgggtcatatattctcactcgccaatgaagataaaaactgcgactatgggtaaagtttataaaatttctgtgatctttcgtgtctgacttttcaaacgcaaattaagacaaactggagcaacttgcaaaattttcgcgttgctctattgtgttccaaagttagattgaacaacagatacctaggtattgcttgaaatgggtgtagtaaatgaacattcaaatattgagaattttaagctcattctacgcttcctgtgacttcaaagtaaaataataaattagaagatgaatgtaacgtaaaatatatgctttaaaccattagagatgaagtttgaacatggttatcgtctaaaaatgctgacttgcaatctcgtctgagagctatttagtcgatgactgataaaaaatatgatactccgtagagtttggggaatcacccggtgaaataatgaatgtatattatggagttggagtctgtaccttgaatagacaatagagtatttttgattttacttttttttaaatatatattttgtaaattaatttctatttatacctatattaatcataaattataatgtgttattggggtagtattcaacttatccactgcgccagttagaaattgctctgaactatatacctatctcgatcgtttcattgtcagttgtgcaacagcgatatgagacttatatcgctcgatgtaccaaaaagcaagcgtctcatataatcacaaagacatctctaataaaaaaataatcaatgcaaatcgctgcaaaaagagattgtaaaacatttactcattcattgagaattaatgtccctgattttttttttcaaaagtgttggcgtcctgtttgccatttatatttcatgtgtctgttaacgacaaaattttgcagtgtttcaaaactgaataataaaggcacattattggagatttttgaaaattatttgaaaacatctcttcctaacttgcatgatttttcaagtattaactgtctacctaggaggcattttttagagaaaaatttgaaacacatttcaatcaagccgcagtatgttcaactcacggcgagtgtatcttaacaaatttatttagattttaagagaattttatcacgagagctggcacagccttttgaaatacgaagatacgcaatgagcaatacgagagaatgcttcagtgtctgtctctgacatgtgcgcctttatttaaatgtgttgttgcaattattttagtctcttacaggaaaagatgggtcacaccatgtgcgtataatgtcggtaagttgtagcaatcaaacaatgttatatatatcattgatttactgtcactcattctacccacaggtactattttaaggttagacaaattgggccataaaatgaaggagaagaagattttatttcttatttgactttgtaattttgaatctattcattattttgagactattacg

SEQ ID NO: 35 - DNA, 7803 bp, Bemisia tabaci
  source 1..7803: mol_type = genomic DNA
ctcactctcacaacagtatgaacagctgcgcgcacagataatttaagccccgatgatggtctaaattcaccaactgcataatgagcgaaactgacaggtgattggtcggtggaaccattagagcgaagctggacgcaaacttttatgagaaggttaataaacattggtgctatgaactcgtagaacagtttacttcgaatttcaccgggaaacgtttcaagattgatcagtatctatgtttctcccgggaatggtggtcagtgcgaacttgaagaagcttttacagaaaggaaagctcagaaaaaaagttaaggagctctgtggtgtttctcacataacaggcctttagactaggtacgaatttgagtattctgatatatgtttccacttaaaacacggcaaataacgaaaatagctaatattaactccaaaccaacataataattgttttatttagcattgaatatgaaaaatttgacttctctacacataagaaaaattagagtcagcttgaatcaaattgcccactacagcggtttttgcaagcttctcaataagcaatgttccctcctcaccctgtgttgttcaaagtgtaaaaaacatacaatagctgagtcggagtgacgatattgaggttgtcatatttttatattgtaaaaactatcacggagacttttagtgtgcgatttaactcgtgtagatcagtttatgcggaaagtttgaatttatgcatgaaaaacgttaatatcttggtgcggaattacatttcggtcattttcgtcggacaaatcatgtttccgtgaaatttggatgagtaaacgtatatcatatcacttaacttcgcatctagtctgatggtctattttaccgaacagcatgccgcgtctacattaatggtggttcagtaattttcttgcggacaatattagagggcaggaattaaactccaccgggcatgttttcctattatggttttgcccaaaaacatagtagacatgctgagatgatgatgtttacagttatttaagagtcaaatgacattacgtaattagttgatccaaggttctgctggtggaaaaatgattgagtaataaaaggaaataagagagtggaaagaagatactgtctaacgagaccataggttctcgaaaatgaataagaaacttctgtccacttttcgtgaagcataacatccgtgctggtccaatgaccactaaacagatactcgtgaggtaagaaattctttattcgatagagctctcgcatgtgtccgggatttgcgttttcaatgatacttctgctgtaaaatttcgcaagaaacacgatgctgccactgattttttctaaaagcaaatccaaagctcaaaataagctttcaaagttcagaccgcaatggagggtatatcttccacaacgttgagagttgatgcaatgcgagaagtattcatgcaggcttgtaggcactaataagcgtttgacgctgaccgcactgtttggcgcaatgcgtgaagtatttctgcagtcttgcaggcgctgatatgagctgtccgtatactctcgccataaaggcactctagttttctctgcgatcaattcccaaactaaaaaaaaagctctcagagttcagggcgtaatggaaatatatcccaggctacgctaggagttcacctctcctctatatctaatctccatgcacagatagggagcaagtacattagcagagttgccgaggttcaaatgggcaaccctgctaatttattttctccctatctatgcaagaagaattagaccagttatagaggaggggtgtacgcagtactcccagcgtagcctaggatatatttccattacgccctgaactctgagagctttttttttagcttgggaattgatcgcagagaaaactagagtgccttcatggcgagagtatacggacagctcatatcagcgcctgcaagactgcaggaatacttcacgcattgcgccaaacagtgcggtcagcgtcaagcgcatattagcgcctacaagcctgcatgaatactgctcgcattgcatcaaacgcaatgcgagagttacttgcgataacttttcgaccacgggtgtaggacttttgccactagccggatggaaggcgcatcacactgcgaagatgactccaccgcattcccttccctcgcccacacgacgacgctgaagccaccgttaaactaggattacgcgtcatcattcttgactttctgctccggttttcaccacagtggacctttagacaaggtacgaattaaaggattctgatacatgaatcttcaccaaaatttcatgcaaaacacgattcgcgcgacgaaaattactgaaatcaacccctagcgaagatattaaagtttttatttcacattgatttcaaggaatttgaactgcccgctcacaagaaactcaaatctctacgtgagtcgaatcgcgtactacaacggtttcagcaatcttctcagtcgagcaatgttcatttcccaccatgtgtcgttcaaactataagtaatttgctatagctgagccgaagcgtcaagattgaggttaccagatttttatatcgcagagactgtcatgataaacgtttagcgcgcgatgtgaatcacgtagagcattgagttttcatgagcgggtggtttgaattcacgcaccaggaatcattaaatatcttcgtaaggagttgatttcggtaattttcgttgtgcacatcgtgttttacgtgaaattttggtaaagaaacatgtatcagaatgctgacattcgtaccttgtctagtggtccattaaagggaaaatatgcatcttcattgtaacgttaacattttcgaagcttacattttgagattactcaggaaaattcatagaaaccttttaggaaaactatgtgtaggttttcaaaaatgctgattaaaaatacaacataaaaagtggtgcataacgttgcaatcacaacgcgtgctcccgtgggcttttgaactcattcatttcttacataacttgaacatggctattctactattttttacgtgtagtttttctcattgcttggcggtcgcttagaggccgcaggcccctggttgtaatagtaaaccgttctggataatttgaattgataagttggctgcccttatgggccccaactttattcgcggaggcatcggcgaaggcctgatggattttcggaatttcagaccttctacatatactctcgctatgcaggtactcttatgagaaaaccaatggcaccatcatgtttctagtgaaattttacgaaagaaaaagtaatttaaccgcaaatccctaacacacgcaagaactgcaatcttcattttaagggtctccataggacccagcgtgtataattatcctgtgaacagagttgccatagaatttggacgatttaattcactgacatttccctgatttccctgacaattttggtggaattccctgacaatgggccagtcgcgctggccttagaatcgtgttttgatacttgattcttgtggatttactggaaataatcagatctggtcaaacagcaacgttctacgtccaatattaaccgagatatcgccctttaaaaaaatcggtttatgacatcatccaccgcggtagtgacacccttggtttcttccactttgcttctatccgagtcatatgttgagtaaccagtgcaaatgtgcgtttgcctgactgatgaaagcaaggttgaagaaaccaagggtgtcactaccgcggtggatgacgtcaaaaaccgaatttttcaaacgtgatatctcggtcactgttcaacgtggaaagttgcagtttggacagatcttaatatttttggctactctacaagaattaagcatcaaatcaaaattctgggatcagcgcaactgatccattgaacacatgccaaattgtggaaaagacatacggtaaaagctctcaaagtcaaactatcgttgggacgaaatcccgattaagtcgaattttttttcggtagtagttagaaacagctttcaggcaaaatttgttattcgagaaagcaaataaaggtgacttgacgattttttcctgacattttcgtcattttccctggtatgacttttttaaattccctgacatttcccagtgtgcccggtattccctgattgtggcaaccctgtgtaaaggcaccagagacaagagaccctccactcgtacctcgactatagtggaagcttttactttcgggacttcaacattcaactgttgacctacctacttggttgatagttaacaacgtgttggccgtttcattttgcagacaaacctaagtttgggaaacttattcggctcgacgtcacccgaagctcatcatccaccatgtaggtaggtcaacagccgaaaaaagattgaggactgttgctcccttataattgtccatacggaagtatcgaatccctgaaagtaaaagcttcccccatcgccaagatactagtggagggtctcttgtctctgacctgattccaccaaatgacttagagctttcgattctcgcaggcagatgtcgctgcaggcgcggctgaagctgcgcaagagccaacggatatggttctttctcctagccgcggggacgttaatcagcctctccctcctgttcggcgcccggcggcatcggatccacctctcccagtttctagcacctccttacaagggcccaccccccgatgacctctgggcgaacatcaacaacgaaacaggagccgccgagctcatcgtcccgaacatcgtccacttcgtgctcttcgaggacccgaagatcagcttcatgcacttcgtctgcatcctggcggcgctgcggaaccagcgcccggagaagatctacttccacgggaacgtggcgccctctggcgggtactgggagcggctcatgaagttggagcccttcaccgagcgcctggagatgcggcgcgtggagctgccgacggagatatccggggtgaagatccagcccgggtggcggatcttccacggaggtgacgtcacccggatccgggtgctcatggagtacggaggcatcttcctcgacagcgactcgtacgttgtcaggagtctcgactacttccgacgcttcgagatgtccatcggctgggatgaaaatcagttcctcggttagtttacattttctcttatgagcagagacacatggaccacgctaagcagacaggaaccaagccacatcagctatcgccaaattttactaggcaatttaattttttacttgaaaacggttgtgcggattttcgtgcaaaaaatgggttttctccatagtacgcagcaaattccttaaaattttcaaaggcttgcttccttcctccttagcgcaatccaaatagcagtatgagagaataacgctgggtctacacgataggcccagggtggcataaaacgtaagaaagaaatgaaagattggaaatctcagtgaaatacttcaagaaatttcacgaggttgtgaaatattttatatttttcaggggctagaataagcaacctgcactcagacacaccaaaatagaagaaatctaatttttttattttgcgaaacatgaaaaggaactggtattttttaatatctttcatgaatttctgaaaattcatgaaaaatttcacttgaaatttcaagatttcatttttcgtgaaattttgccatcctgtatgagtcagttgtgctattcgcaaaatcgcattaagatgggataagcatatggatgtgtaaaaaaaaagtaagccaagagcaacggagaaggatttctagaggattcctaaactacccacgccaactacctcacggtagctggtgcacctttaaccagccgctggttgtaacgactaacctatgtttttccgtgtatactttcagaatattaaataaaaaacacaaggtttagtgacccttgtactttgtttccaggttcccagatcatagtagcccacaaggacgctcgtttcctgtaccactggctgcacagctacgacggtgcgtacgacccgaaaaagtggtactacaacgccggcgagctgcctaccacctcggtcctctatcaccacccggagctcgtccaccgcgtcaaggtcctcttcggcaacgacatgaagttcatccacatgctcttcagcaagtactggccgggctggcgggagaactacaccttccatctcctcgccagacaccagtacttgctcaaaaacatctcctccgtcgcctactaccccgtcgtcttcgacgagttcaacctccagcactaccccatcaccttccgcgagatggccaacgaggttctcgattacgagaagcaactcttggggaaacctatcaagggaccagcaggctgattcttgacattgatggacaaagcgatagacaaagaagacatagcgacggcgcaagtccgcaatcacatatcgtcaccttccaggcaaagtatcacaagcgccatgcgacgtttaaaaatttccgccgccattttatttctttactgagaaattgttggttgaatctttttggaaatttcactaaattttatcggcagcacaaagaaaattcagtgaaattttcggacagcttcgttgaacaatttctctgtaaaaaaataaagtggcggcggaaatttttaaacgtcgcatggcgcttgtgatactttgcctggaaggtgacgatatctcgtttgcggtgtctgaaaatctccgcctctttattattttttagaaagagaataaattgacatcacttcttgaagtttttgcagaattttcttcgcacagagaagaaaaatcaaggcagttttgaagaattgccgttgagtagttttccgtttaaaaaataaagcatgacaggaagtcagcgacgtcgcaaaccgagttatgtgattgccgacttacaccgtcgatagggagtaaggagcgatcctattggttgaaatgggtagctcctgtagactaagggagaaaatgacagactaaaaatcgggtatcccatgagttgtcgttagctagtctattacctactgcttttgtccattgcaaccaccctttccttcaataggatccctctatatccctgtttgtctacagctttgtctaccaatttcaacaatcagtccgcaggttgagctttcacgtttggcttattattgttaaaagcagctatgggcaaatgttcctttaaaactagggggtatgccccctggccgtttcgcggcccaacacttaaagagtgctttgcactcacgccctcaggcccacttgccgttttttaatcttgacagagcgacttcatcgaaggactatctcctatcgacagcttgaaaaatcatggaagtcgacctggttgatctttcggacgaattacggcaaaacaggaacatttacatcgtttaaatgggagtattcaccactccatcacttgatatagaaggacctaggttccaaaatctgaataaagccgacctagggcctttcgactgttgatacctggaaaatcacggaaatcaaaatgtggagcggtaaaacgaactgtgacaaaagttggcccaaatgtgatgaaatttagttataggcagacatggaacaaagttcgatagagtatgatggaaattttgaaaaaaaattggatgtaatgggaggaaaccgaaaaaatctcgtttactcgaaatctgcgtgtctttaagtgccctatcacatcgtcagacctattaaaatgtatggttgatctcattagttttttaagatgtacgtatgatgtgtg

SEQ ID NO: 36 - RNA, 4436 nt, Bemisia tabaci
  source 1..4436: mol_type = mRNA
mrnatttttccagactcgccggccaatcctatcacgctatcagttgatgtcttaccttcgtccgagaaggggcatgaagttttacgctttcttcccataaatctccgataactctttatctcgtgcgaatgtttccgattgtctcgttctagtgatcggtgcagttttttcccccgggccaagttttttatacttatattcaatgacatgaaattttagtgcagtttaattttttcccaccttcctgatgagagggtactgagtgtttgttacgccaatgcttcttcctcttaacgatgtattgctgcatgatgccgtcagtcccgctaaacaaggagtccctcaaactcgaggaaatcaaccagaacgattcggggatctcgccgagctactgcagcggtgacagtcgcggcagcgcccagtcgccggcctcctcggccgaagattgcgggatctccacccggtcacctccaccgctcctgagcatcaaggaccaaaaacctctctccttggacctcagcgcccccaaatcgccgcaacccgccgttgccctgtcgcagtcccagatcaacctcatccgcagcctcaccttcgcagcgcgatcagcatccgcagccgccaacagagacccatcacgagactcacctcgtagcacacacaacgaatcacctcaagagaattcgtccagagccaccccggatagaaccttacatggcacttcgttcgaagcggcatcgaatgggacttcacatggcacttcgttcgaagcatcgcgtggcactacgttcgagggaacctcctacagcagctccttcggtggaggctctgcgttcggagccctgagcggtggcactccgcaaggcgcccccttcggcgcttcgaatggaggcagcgcttcaccggtggctttccaagttgagagagcgccgttgggttcgccgcggttgaacgcccacgattcgagtcggtcaatgtcgccggccagctctgtggattcggagtcgtaccaagatcgggagcatcccttgcagcagttggccctggtcgtcaagcgaaatgatatgctcatgcccgcaccgccggagacagccgagaccaactcttctgataagacgttgatacactgtccactttgcaattacaccacaaattcaagatctacattcaacgcacatcttcacgcacacgaaggccaaaaatgttgctacatctgtgaactaatgactgagtcagtagaagagttgcggcaacactaccaaaacgttcatgacgtcaacgtttcagcggacttcctgaaccatagctcgggtggagaagaggagcaaggaattacagtaccaaagctaaattctcaaggtaaggtgaagaagcatcggtgcaagcaatgtgggatcgtctgcgtgacgaaactggaattctgggagcactgccgcgggcacatcaagcaggagcgactcctgacctgccccaagtgcccgttcgtgaccgagtacaagcaccacctcgagtaccacctgcgcaaccacttcggctcgaagcccttcaagtgcacgcagtgctcctactcgtgcgtcaacaagtccatgctcaactcccacctcaagtcccactcgaacgtctaccagttccgctgcaacgactgcagctacgccaccaagtactgccacagcctcaaactccacctccgcaagtacaagcacgcgccggccatggtcctcaacccggacggctccccgaaccccctccccatcgtcgacgtctacgggacccgtcgcggacccaagcagagaccaaagaagcacgagagtccaaagaagatccaaacgacgcagtactcaaaccaaacggcgttccccaatcaaacgcccccctcgagtcagatgacctactccagtccggcgttccccacccaacccaagttcctgtcgacccagacacacttcccaccgagtcagttcctttccgttccgccgtcagttccgacgatcctcacgcccaactcctactcccccacccgatcgaccctgtcacccgcccctctctcgccggtccaaccgcggctcgctagtcaaaccctgtcccctagtcagagacaatctcctaatccacccctctcgtccccgcagacgtcacccacccaattcccgaaccctgcgttctcgagtcaaccctactccatgttccctgcgaactacgggctctacccgccgttctacccgctcgtgccgaactttccactctcgtcgctcccgcttcttcagctggacattccggcgcttctggaggaggccaagcggtctacggagacgctgaataagctcaaggagttgctccagtcgaacaacaacaacagtcagtacatctccaaagcggtcgcacagcagatcatcgacgaggcgagttgtccctcgacaccagcgagtgacgtcaactcggctccgttggacttgagtaaatcatcgggcaatgatggtaatacgagtgcgtctgcaggctcaaaccgacgtaaaggcaaggctgtaaagagggtgccggtgcactccatgtattacgatgatagcgatggtgaaaggtctccagttaagttcagcgcgcccggaatgctgcccggcgcacaaaagatttactgagcctctgtattcctcaagtcagtgtaagtgtttttcaatttttgattgtgtaagaagaaaagcaaactataggaaatattcgcattcaaaatgataggagataggaattggttgagtagctaaaattttaaaagtcaatgcagctacgtggacgccatgcagcaataatgatcattacaccattataacctttcgaaatttgcttccatattttattttctataagaaaaacttatgacgtattaacggtccaagttttttgaaatctctctttccctatgaacattattctcaaaaattgaccaatgatgttgcgtggttttgctatggaaagtaaaatatcgaacaaagcacctagtctattctaattagctttaaaaaaaaataaataaaataaaaaaaaaattatagtttttagcgggtacttaaactgagagccgagtgttgatcacacgaaagtagagagctcgtgacttaattttcaagtgatcagcactccatttagtccattcgtgaaatttcagtcgaattttacgcattgtccgaattcaatctctttggctgtccgttttcaggtctctcaagtttaaagtatatgaatggacgtcctaataccaaataatattatttttgatgaatttcattagtaacttacatccatcagtgtaactgcgttcaagtaacgtctgaatcataagcaactcaatatattctctcacagcctattttctatctccttcatttttcaagaatcatataccttgaaacttgtttcagatttttgacgtaatcgctccgtcagattaaaagatcagtctagatctatcttgtttgagtttgattcgtttatcccacatttgtaaccagaattgcatcattcatttctcttccatttatctcacaagtttgcatacctatcagtagaacccagaaattctctcaccgatcaaaaatatttctgcttgtcagttgttttgaacttgtagctggagataatttaatttcaagagcgttttctgaaaatcttagctccttttaaatcctggttaattccttcgtgtattaactgaaaattctccttgattatcattccaaataactatttatcctaagtttgcttttctctcctttttggggggctcgaaacaattacgggtttatctataagactgccaaattgcgctgaaaaattatttaattcagtttagtattggctccattataactcttaatttcaattacttaactaaatcttcttaaaatgacgtctaaaattcgcacattattaacgaaagcttcattggggggaagtttctaaagaagcatgggaagataggtttgacactcgcaaaagtaatttcaactttaactgacaattcataaaaaagaataggtacacattcaaaacgatgaatttataaattgggatattgtcggcttaatgcattaggaatttaacgatcacgtgcgaatggttattgggtataagtgtgtcatccataatacaattgtcaagagcttatatttttaggacttatcgccttttgagcagagtttttcacgaaacgctgccagttttcgtcataaattgttctcgagacaatattgtcaggttaagcaagtcagatgcccaaacctgttccgaggtctggtatggtcaactgatgattctataattcaccgggcgtcaaagcaaagttttgtatagaaacatgagggcttgagttaatgttagcgttggcgtcatgggatttactgttagttttttgcgccattttggcgtgatgactagagaaactaccaaaa

SEQ ID NO: 37 - RNA, 4458 nt, Bemisia tabaci
  source 1..4458: mol_type = mRNA
mrnagtttggatagatgcagcggtcaaacgcgtgatgagtctgacgaaagcgagtaatgtctcagtttcagctcagtgctcaactgtagagctagtatgacggataagtagtgaggtgaggtgctcattcaggattacggtgtcatgcttatacccagatgtcatctccggcagtactatgctgctgctatcgcctcgctctcggcgatgatgactggggcagcaatgggatggccctcgccggtactggagcacttctgtgaaggcgcccactgcgaggtgaggatgacggcgggcgaggcctcctgggtgctctccctcatcgagatcgggaacctcttctcgccgatcccttgcggttacctcgtggacatgtacgggcggcagccgtgtctcttcgccaccgggccgctcttcctcggctcttggaccctcatcatctgctcccgctcggtgggctacctctacctggcgcggctcgtccagggcctcggcatgggcatcgtctacacggtcacccccatgtacatctcggagatcgccggcgccgacgtccgcggccgcctcagcatcctcttcgtcggcctcctcaacttgggcatcctcctcgagtacatcgtcggccccttcgtcagctaccggacgctcggctacatctccatctccgtgcccatcctcttcatcgccacctccatctggctccccgagtccccgtacttcctcctcatgaacgacaagtccaaggaggccatcaacgccctgatgtggctccgctccgactactccaaggacaggatcttcgaggagctgaccctcatcaaagacgaggtcgagcaggagaaaggcacgaaaacggccgccaagaacaccttcggggacatattttcatcggcggccaaccggaaggcgttcttgatcgtccagatcgccgcctgcgctgacgtgctctccggcatgacggcgatcctggcctacgcctcggtcatcttcgcggcgccgcacaacacgacgatggaggcggaggactacccgatcatgttggggctcatcatgctcctggccatcttccctgccgcctacctggtggacatggccggtcggaggccgctcctcatattctcgtgcctcttctctgggcttttcgaactcgtggctgccttctacttctacgcggccatgaagctggactgcgacgtggctcgcctcaagtggattccactcttggccatctgcgctttctctgtggcctactcgatgggtctgggctcgctggtgcccacgctcatgggcgagtgcttcccctctcaaatccgcggtcctgccagctccatgacgtccatcacgctctgcgccatctccttcctcgtcatcaagttcttccaggtggtcaacgaggagatcggcttgtattttaacttcttcatctacggcgtgagcagtatcgcgtgctcggccgtcttgtggcttgtccttcctgaaacgaagggcaagaccctgagcgagatccagcaggacctgaaagcctcttgcaagcccagtaaacctagtttgccgctttatgtaaacgcctcagtgcccaaaggtgtcgaggcttcgtaagctaccctggagggcagtggcgacttttcaaagtactggatttcctccatttaaatcaactatcaacaacacaatcgaggttaaactatgtgcctcggtacaaagcgatcgctttatttgcatttcagtataaaaacccagttttgacaatttaaaagaatcgccactgctagagggtgctttggtcaatagtcatgatgacattcgggtccgccctcgagtatgaagcaaccccgaaattactcatggctggaaccttgttcggatctggcaagtgcctcaaaggtgggttcccctgacaaataacaatgcttcccaagtaaccttggactgcatcacgtatggttaaattggatgcgctggagcggatcaaaaagttccaagcgcggcgcagctatggccatgcttgaccatagtgtgggttatttgtattggtaaatatacattgccatggcgcaactgtataactaattttatgtataacgtatgtattgtttccgataaaaagaggaaattttggagttctaagaacgaaaaatactgcaaacgcgtggaagcatggaatactattacagtgtccttgtttgcaaggcatcgttgttgcaataatcaagctctctttcagaatgtagagaatattagagtaattaaagataagtcgcgaataaaatcgctgaatctagtcaaaaagatgtgtatgactgagtctcgcaaatgttatcagtaagcttattctgttttaacctccttttgaagcattgtcgtgagttggaactaggagttctatctatataaaaattccacttaagaaggaggagaggagaaaactatttttttcctgacaaattttcttttgtttttcatttttgagcgaaatttatgaaatgtccatttttttaaaactatttgtctccattataacaaaatataccgagctctcctgtaatgtaattttcttcctattaatttatgtaggtaactgaattgctatgtgaatcggcaatgcgaatcactttagtatatccgaacaatattgaaaccgaatgctttaatatcagttcgtctaacagcagtatcagcgtattgacttactattatatattcacaaaaaattcaggtatcagacaaaaagttattattatacgtaatgaccgcttaaaactaatcctagcatcttatgacgtccatgttcagcaaaacatatttttaaaacgtcattgaaagcatgctcgtacacatgcaacctgtgaattcatattaggagaagtggcgaggcatgataatcgactatctatatctccccaatttgaagctataggaatgaatctattgtaactgtgttcgcaaactgtgttcgttgcgaacaccctttctatcgatccttttccgtaggtttaaatggcagatcaatcgatatatcgcaaagcacgcctcgcctctgatcatgaggatgattatcctcggagcgttttcttctcagaaatttccagcgtggaaccggtcaaaagcaccgcaagaatctcactatcctaatcagcaatacttgtcccgttcaacacgaccccaaggtgtaaaagtcttatagttaatgtaatatcgattatagtttacagttgtcttatcatttttgaaacaaatgcaagggtgtcttttataggacctaattttttgcacaagtaaagtatcatatttctcgcaagtgatcggataataaatgccgtcttatctaacgatcaatcattaggggaattctttctagctttcgggtaaggctctcttttcgatggcaaataattatcgctgaattcaattaattttttactgatgataagtttagaaaaatgttttctctctgcatccgatacaattttaccaatatacttagaatttcgagtaattttggaatttagagtttgacacataaatttgacaaaatatgaatgagtcctttctttccagcttagttagttgtgtgtgatgactttgcaaacccacggccgtagttcctcttttcttatgcgcatcagtttgaatgacgtttgtgaatgggaaatgaatttaaaagacaatgtatggaaaatgtcgcatcatcaacattttaaagatttttgccgtcgtagtcgattattttgtaccttattacgctgcaggtactgaaattgttactcatagcagcagaaacagtttctagagattgtcttcttccagttaatatcttgtacttttttagtcgtgtaaattcggttatttttatcaatttgaactaatgtttattctttacttttgaattgtttttcttatttcgtattactttcatttttttcaattagttatttttaacacaacttctcgtgctctattgttctaattgattaccgtgctttcaatccttgaatttcttaaaattttacgacattgctcatgagttttatgatctcaagcacaatttatttaattaaaatttttcaaactcttcatatttcaaactaagtgaagtggcgacgcacgactatttcaaagctcattcactcatttttgtccagtaaccgcttcagatcatctactctgtttagttcctgtcaagactatcgtaagataagccattgaagatgcgtttcttaggattcagtcgtgtagattcaacgtcctaagtcatgccacaaaggcacttgagacaatttcaacgaaaattaggttaacgcacgtggtgaatgtattttttcgacactgaactaaagagaacatcttgttaataatttcagcttcaagacaaaaatccttgtgaaaattgttagttttgtaaaaagttagtttgtaagtacatttttttactttaaataaaactttgcatgtaaataa

SEQ ID NO: 38 - RNA, 3439 nt, Bemisia tabaci
  source 1..3439: mol_type = mRNA
mrnactgacgtggaaccaagtccgtagtcggctcacgaattcttgcggtatttcgaaatttgaatggtcttatcaagtttttgacgcatttctagtgatccctttttaattactcgttataatttttcggcagtgcaatggtttaaattccactcttgggcgtttcagtgagtttttcatgcccagcccggttccagcattttgagtgaataaaccaatcatggcaaatagcgttgaacagccgtgctacaccttgatcagtcttccatcagactcagagtttcccaatgaaatgcaactaaagtcagatctcgaaaagggagacttgcgaacaaagatcgaagccctgaagaaagttatctacatgatagcaaatggagaaagaatcccaggacttctgatggttattatccgctttgttcttcctcttgaggaccatacaatgaagaagttactccacattttttgggagatagttccaaaaacattgcctgatggcaaattgttgcaagagatgatattggtttgcgacgcatatcgtaaggatttacaacatccaaatgaatttgtcagaggctcaacgctacgatttttgtgtaagatgaaggagccagaattactggaacctcttatgccagcaatcagaacgtgccttgagcataggcactcttatgttcgtcgcaatgcagttttagccatttttacaatttaccggaattttgagtttttgattccggatgctccagagttgatcgctaattttcttgaaagtgagcaagacatgtcatgcaaacgcaatgcttttctcatgcttctccatgctgatcaggaacgtgctcttacttttctggcatctagacttgatcaagtttcctcttttggtgatattcttcaacttgtcatcgttgaattaatctacaaagtttgtcatgcaaatcctggcgaaaggtctcgttttatacgatgcatttacaatcttctgaattcaaccagtcctgctgtacgctatgaagctgctggaacattagtaactctctcgagcgcgccaacagcaatcaaagctgcagcatcatgctacatagagttaattgtcaaagaaagtgacaataatgtaaaactgattgtacttgaccggttgattgtcttgaaggagcaccctgctcatgagcgtgttctgcaagatcttgtcatggacatcttgcgcgttttggccagccctgaccttgaagtacgcaaaaagacactgaatttggcaatggatttagtatcatcaagaaacattgaagagatggtgcttgtcttaaaaaaggaggttgccaaaacacataatgttattgaacatgaggacacgggaaaatatcgacagctacttgtgcggaccctccatacatgttgcataaagttcccggatgttgctgcaacagtcattcctgtcttggtcgagttcctttctgacacaaatgaattagctgccacagatgttttagtttttattcgtgaggctattcataaatttgacaatctgagacccctcataattgagcgtctccttgacacattttcaaccatcaagtccgaaagagttcaccgagcctcattatgggtccttggagagtacacgaacagcccagatgatattcaatcagtaatggctcaaatcaacaaggcattaggtgaagttccaatcgtagaagatgaaactcgcagagcagcaggtgaaaaaggtgaagaagtcgaacattccaaaattactagcagtggcacctccacccctaaacttgtcacctctgatggcacttatgcaactcagtctgcttttaacacaacaacaaatacaaaaaaagaagaacgcccaccacttcgccaatacttcatggatggaaactttttcatcggagcatctctcggaacaactctgaccaagctagcattgagatatattgagctggtacaagataaagtgaaacagaataaatttttgtcagaagctatgcttatcattgcttcaattttgcatcttggaaagtcgggcttgaccaccaaagcgattactaatgatgatgctgacaggctcttggtgagtctccgagtgctgtcagaaaaagccccacctatcgttggaatttacaccaaaaactgccggcaagccttagcatccatgcttgtcgccaaagcagaggaagaagcttcatcgcaaaaggccaaagagaaaccaggaaaccaagtccaaaccgatgaccccatcaactttatgcaattgtctaccacacgcggtggggaatttggagccactgaaaatgtttttgagttgagcctaacgcaagctgtagctggcaaccttagtgggtcttcgcaagatacacattcgcctctatctgcaagcaaactcaataaggtgacccagctgacaggattctcagaccctgtgtactcggaagcttatgttcacgtcaatcaatatgatattgttttggacgtcttgatcgtcaatcagacctcggatactctacagaactgtaccttagagcttgcaactttgggcgacttgaagttggttgagaaaccacagcctgtagtcttggcccctcatgatttttgcaatatcaaggcaaatgtgaaagtagcctccactgaaaatggcattatttttggaaatatagtatatgatgtcagcggtgcctcctcagatagaaacgtggttgtgctgaacgatattcacatagatatcatggactacattgttccagcctcctgtaatgatatcgagttccgagtgatgtgggcagaatttgagtgggagaataaactctcagtcaatactaacctgacagatctgcacgagtatttgcaccaccttataaagagcactaatatgaaatgcctaaccccggagaaagcattgtcagggcagtgcggtttcatggcagccaacatgtatgcccgctcgatcttcggagaagacgccctagcaaatctcagcatagagaaacccttcaacaaaccagatgcacctgtcactggtcacattcgaatccgtgcaaaaagtcagggtatggccttaagtcttggtgataagatcaacgcaacacagaaaagacctgtcaaagcttgttaaccctcataatccacacactttcattgcatttttcaccgtcatcaatcagagtattttattgttttcttttgtacatatttattaaatttgttaagatttttattagtcaattgaattttgtgtctgctgccagcttttaatttatagtgaagaacattttgggagattgcatgatgaatgagtctctaagatgttaatcacacaagaatttttaatgtccagttttgaaagcaggtggttaactttaaatgactcagtcaaatgtaactataattgagtattgttcattgtcttcttcaataaatttatacattattattgtca

SEQ ID NO: 39 - RNA, 2202 nt, Bemisia tabaci
  source 1..2202: mol_type = mRNA
mrnaattggtggatcttctaccacatacggtgcctcttaagatctagtttagtgcatacgatgtgagagctcgttaatcctgagctatgcaaactacttaatcatccttctatgaagtgtcgtttttttcagtaatggtgaaaacattttttagtgctattttttacagccgtaactatccttgtagatgaccaacacctggaatatgcagttcctgtgaaataaattgttggaggaggggtcctactttcagtaaatctttgagtgtactactaccaccacatcattgtaatttttagtgagacgcaactatgtacaaaatcgcttttatatcagtcatttttagcttagtatttaactattatcatgctttgaacgtagatcacaagcagctcgattggtggcaacgagctgtattctatcaaatctatccgagatcgttcaaagacagcgatggtgacggaattggagatttaaaaggcatagctgagaaaatttggtatttgaaagatctgggcataacaggagtttggttcaacccagtcctagagtcacctggtctggatcttgggtacgatatttcaaacttcacgaacttagatcctctttttgggacgatggaggattttcagtacttgagagaagccctatacaaagcaggaattcacctctttctggatatcgttccaaaccacacgagtgaccagcatgactggttcttgaagtctgtgaaaaaaatagacccttatactaactactacatctggaaggacccaaaaatagtcaatggccagagacaaccgccaactaattggctcagtgagtttggaggctctacatggaaatggcatgaggagagaaatcaatactacttgcatcagttccattggaaacaaccagacttaaattacgattgcgaagagttggttcaagagatgatggacgtggtgaggttctggttggagcgcggagtggacggcatgaggttcgacgcggtggcctacttgttcgaagatcccgaatggcgagaccaagaattgctctcgcccgatctcgacccgacgaactactggaattacaaccggtcgcggacgatggaccaaccgaatacatatagattgataacaaggttcagggaggtcttcgatttctacacgaagaaagaggggaaaacaaaagtactaatgacagaagcatatacaactctcgatagaacaatggactattatcagtttgaggggaaaccaggagcccatatgccattcaatttctttttcatcacgcacgtgagcggtcgctctcccgccaaagattaccaaaaggcaatccagggttggatggacagtatgcccgcaggcttttggccgaattgggtgatgggtaaccacgataaccgacgggtggcggcgcggtatggatcggatctagtggacggcgtgaacatgatcgggctttgcttgcccggtataggcaacacgtactacggcgacgagatcggcatggacgatacggtaatccgattcgatcagggtgtggatccgcaggcctgtcatggcggcccggagtggtacagccagaaatcgcgtgacccggccaggactcccttccagtgggacacttccttgaattcaggttttacgacgaacagaaaaacttggctcccagtcaattcgaatttctggcgtttgaatctgaaggcgcagatgcaagcaggtgaaaacagccactggaaagtctataaaagactgatgagcgttcgcaaaacagacaccatactttacggtgatttggaaacattcgtcctcacgaagtatgtcttcgctttcgttaggcgcttggaaggaagtgaagcttacgttgtggtggttaatctgggaagtgactcacaatcaattgatcttttggcatttatgagtgatctaccagatgttctaacggttcacaccagcagcgtcaacagccagtatttaccgaacgataaggtatcaacgaatggatttttcctgcgcccaaaagcctctgttcttttaacaacggccaaagaggtaccacctcctgcttacaccgaccctgcaaatggaagttctacaatccacactgtgtatttcagttttattattacacttttcatctacgtatttttctcctaggactctcgtaataatgtgaaattcatagatttcatatacacctttctccaaa

SEQ ID NO: 40 - RNA, 2696 nt, Bemisia tabaci
  source 1..2696: mol_type = mRNA
mrnatttggattttggagttttggttttggttaggtgcggagtgcaattctaacttctttagagtgactcatggtgtaatttatcgagtatttctttattcatttctaaattgaattacttttaagtgctagaaataacattaagtcaatatgagtttcctagcaaaagtgttcggtggtaaaaaggaggataaagctccctcaacaggggaagctattcaaaagttgagggaaactgaggaaatgttagtgaagaaacaggaatttttagagaaaaggattgaaaaagaaattcagactgccaaagctaatggatccaaaaacaaaagagctgctattcaggcgttgaagaggaagaagcggcttgagaaacagttacaacagatcgatggcacactgtctacaattgaaatgcaaagagaagcactggaaggtgccaataccaacacagctgtattaactaccatgaaaaatgctgcagatgcgctcaaagccgctcacaaacacatggatgttgatcaagtgcatgatatgatggatgacattgctgaacagcaagatgttgctaaggaaatctctgaggccatttcaaatccagtcgcatttggccatgacattgatgaagatgaattagagaaagaattagaagaactagaacaggaagaactagacaaagaacttctcggcactgggccttcaccagcactgccaattgtgccttctgcagagcctgctaaagtggcagataaatcaagtggcaagaagaaagaggaagatgatgatgatatgaaagaattgcagcagtgggcttcataaaattcaccttcccttgtttgtaaaggtattggaagaacagaagaactagattttacgtggtatactacaaccgatttttcctatcttctcatcaaaaatttccacaaactttacaatatatcaattttgatcttagctttatgtaccgtgctttgctaatcgcaaaaaaaagaagagtgctttcattgcaatgaaaactacaaaacttttgtttgaacggtcatcaaagagagaaaagacgttttacaccaactttctgctacaacagcacatggagcatctcctcaggattaccgtgttttcaaatctaatttctttggttgctctctgcatcattttttctgaagatcactatagtaagtgctgtgaaggaaccttttctgccatcctgtctgttggtaaagaacgtgctagtttttagagtatcaggttgatagttttttaactgttccttcccctctcttttaccatctttgattttgaagaaaagtttcctatttgtgaagtaagattaacagttttcaactcggtgagcaattggtttatatcaatttagagtgttttctttgatattttggctgtgcttctaattttgataagttgttgctcgctgtttttgaggaacaatatttatcatgttaatcctaagtttactctatttaaccatcatctcaaaatttagctgagccatgtcatgaggtgaaaacttctcaaaaatgacatgaatttctgtttttttcaatttatttttaccggaagtggaggaacatttattctaacgaaccattctttgctcataatccaagaacctttttggttattcctgtctacgttaaagctcccttgctatttgtcacaaatgtctacatagtaatggcaaaagtatttgactttgatctattgtatcaaattcaaaacacttattgttcatcatggagtctgagatgtaggtttgttgggttcgaaggttgttatgttttcacatgattcgtactttaattcctcatgtgggaaaacctttggaaccttttctaatttatcagtgacataaggaaaatactctccacatgcattattttgtaatctgagaaataagggaaaatgaagatgcctcctataccctctttgttagcttttcttattttgcttttcatattaagtttaattttctcacctagaaattatctttacgaaagtttgttgaagaaaaaaaggagcaacacagaaaagtacttaaatcatcaacagtggtgattcaaaactgaaactttttaatcaggcagtttttaacacattggaggaaaatgttaccctacaatgcagattttccaagtttaaatcaaaagaaaaccgagcgcaacacttaaaagacataaaacgaaaacctgttatattagtgatcaaaaattctgtagccgaaaagtttgtcaagttttttttaaaactattattaaatcaagacttgatgaaatactttggttaagatgcatcataatttaattacacctgatcgaatttgtcaaaataatatacaaatatgtctataattacattgtcatggcttgataaaataaatgttgcctaattttttttcttgttaagaaaaattacttcgcctcctgctttatttttgagcattagccattattaaataacctttttttacgactgtttctcaaagcgttcatgtgtaaagggaagtggcaataaggcttttgaaggtacttactaacaccttgattgaaatgtagggtcgttaatgaaaaataaaaataataaaaactactcccagttgaaatgaatgactagaattttattaacatttatttattggacaaaaaaaaaagatcagaaaagaggagacgtaaagaaaaacaaaa

SEQ ID NO: 41 - RNA, 640 nt, Bemisia tabaci
  source 1..640: mol_type = mRNA
mrnacagctccaccacttacaccgttcaccgaaactgggcaggcgttttgcaattagcagccttcgaactgtcttcagttttattcatttcgtgtaaatcactctaaaatgggtcttggagactatcctctcgaatatgatcgaaaagtccatggaccttacgatccggctcgctactatggaaaaccggatacgtacttcagtgaagtgaaattaggagagctgggagcctggttcggccgacgcaacaagtctccttcagctgtggttggagctctcagtagagcatactggcgctggaatcgtagattcaaccactgtcgtattggtaacgctgcttacccgctccaagttataatcggaggagcaattattggatatttgatcaactaccccagaactcagaatcacatctataggaagtaccactaaatctatgtccacatgcagtctaattgtttcattgccgtatttgtgcaacttaaaaatttcaaaaggaaagcctttcaattatctgttattccaagttaaagatccttttcttttgcttttattcgtaaatttaacctgttgtttatgtaagttttatttgaattgtaattaggcaaataaataatttgatgggtatccctcatccgta

SEQ ID NO: 42 - RNA, 2651 nt, Bemisia tabaci
  source 1..2651: mol_type = mRNA
mrnaatttttccctgattaggtttatcccacaatatctcaataatttaaatcaatttttgaatcaaactttctgttgtgaaaagtttgactttaatttgtcactattacaaaaaaaatatgggacatgccccccttcccccaccgctcattgcagcagttagcttctttttagagtatctcatatttacactgaacgcgaaaatatatggtgcagccaacccaagttgtttattggtaggatttagctacgtacatagcatactgacgtatatttttttgtttatgcaatttcctttctccagcttagtacctacgtaagttatttcgtcattgcgctcaattgaatcgtaaatgttatttcaaacctcccttcattggcgctacttgttacagcggcacaggttgggtcactcacaaaacttgtcttcattcctacctcctttttcgtattctctttatgccgttcatgcgacgtttcttatttatatctgagactttataatgaccttaagcttgataaagtatgtgattaactacagttttcttgagtttagcagcaatctttattgtttaggctaaatcaaaattaagttcaatgtagtgaagtttcaagtgaaagtttagtggcagcctggtttaagtttttaacctaacctaaccttgattcggccatggccgtgaccatgacataaacacaaatatttcgttcgatttttcctttgtgacctcctcatctagacccagacgcaggttattttttccgattttagtgtcgctggaagttttgagtgacgcgctacattacgatgacattcttacggacgtagtctgctgtgcaataagtgcagcccccacccacagtattatcttatcagtccacttaactcaacttttcgggcactcatatcattgaagcagaagtgtaggaatcaaatttgaaatgtttaagaaatgacagtgactcgtatttttagtgattttcaaacatcagtgattattattttatgatgcactaaatctatgtagccattacgatgacccttttctctccgctgaatttcaagccttcgagtgtcaaacacctttatcagttgtcctctatagttcctgctccttctttattttcctattgtttagaaaatgttttaaggacaaaccctgattcatttctgagatgcttttgtgcggggccgatagcagtgtacgactcgaaagtgaatgagaaagaaattgaatataatgagcaacagaaaaaagtggcgacatcattacaaagagtgtatgaagaaattcaaagttactcacctcccaagaagggcttcttctcaaagattttcaaggagaaaagcagagctccgcaaggggtctacttgtatggcgcagtaggaggaggaaaaactatgttgatggatctattctactcttgtgtcaagatggagaagaaaaaaagaatacacttcaacgctttcatggtggatgttcacaaacgtattcatgaagtcaagaaaacggtggtcaaagatcccagggaaaccaagccaaaaccatttgatccaatccgcccagtagctctatctattagtaaagatgtttggttgatttgctttgatgaatttcaggtgacagacattggtgatgctatgattctgaaacggttgttcacagagctgtttgataatggggttgtgatgattgccaccagcaatagaccaccagacgatttgtataaaaatggtcttcaacgctcaaattttgttcctttcatccaagtacttaaagatcattgtgaagtggtcagtttagactcaggtgttgattaccgtagacgaactttggcaggcgctggcaagcattattttgttaaaaatcaagatgacgcagagaaagcagtagaaaacattttcaaacagttagtagccaacgagaatgatatcattcgaccaaaaactttaacgatattgggtcgtgatgttgtttttcagaaagtctgtggtcagattttaaattcaacgtttgcagaactctgtgatagaccgctggggtcaagtgattactgtatgttagctcaaattttccatactgtgattataaatgatgtgcctcagctgacgttgaaaaacaaatccttagttaggaggtttatcatgttaatggatacgctctatgacaatagggtgcgtgttgtgattactgctgatatacctttggatcaattgttcctaatgaaaaaatctgatggtattggtgaccatgaccgagttcttatggatgatctaaatatttcatcagaatccgaaaatgccgtagccagtatttttaccggtgatgaagaaatgtttgcttttgaccgcacagtgtcaagactgatagaaatgcagagcgaagaatattggaatcaatgggacaagcagcgctgagaactaacatctcttgttaatcatgtaatttgccctccaaaaaatatttatgatattaagttcaggggcttctctaaatttctgtacatttcttcagaggtctctgaataatgaacacacccatcgtgatagcatgaattatgttacttaattagaagtttaattaggattttatttaacaatcagccctgttattcattcaaattttattttattatatttgttgttactta

SEQ ID NO: 43 - RNA, 1062 nt, Bemisia tabaci
  source 1..1062: mol_type = mRNA
mrnaccacttttccgagttaagttactctaccgtcgtccgtcagcgaccactcgaatcacagcccgggggctggtgttatcaatttgtgaattagtgatccctttagaaatgattaaggccatttcaagaggtggccaatttggtgctttttccaaagccaccgctcaagctattcctcctccttcagcatccgtgcttgtacctgctactttacctccttcatccaaaccccttgtggaaattgatcgttctttgctcacatctgactcattgggcaaagctgtatcttcaatcaacaacttcggagttatctccggtcctggagtgactactcaagtgagatttgctcacacagatgtcaaagttccagactttacagcttataggcgagactccaccaagagcccgacctctgacaatgacaagtctcttggttcccgagctgcattctcttatcttttcactgcaggtagtttggctggtgcaatttatggaggaaagggtattgttcacgcatttgtgacatctatgagtgcttctgctgatgtattagctgtttcaaccattgaagtaaagttgagtgcaattccagaagggcaatgtgttactttcaagtggagaggaaaaccgctgttcattcgccacagaacccaagaagaaatttctcgggagcgagcagttccactcagtgacttacgtgatcctcaggaggatgaagttagagtccagaaacctgagtggcttgtagttctcggtgtatgcacccatttgggttgtgtacctattgccaatgctggtgattttggaggttactactgtccatgccatggttctcattatgacgcatccggcagaatccgcaaaggcccagctccattgaacttagaggttccaaagtacgctttcactgacccagacacggttcttgttgggtaaaagattcactccccagctttcttctatttaagcaaagctcatgtaaataggttctttaatgcccttgttatagtcgtgatcagtaagttcaaaagttaataataaactatgttgttcagaaacta

SEQ ID NO: 44 - RNA, 2349 nt, Bemisia tabaci
  source 1..2349: mol_type = mRNA
mrnatgtttggcgctgtcaacattgaaacgactgaaattatcactccgttgtgtttcaatctatcaatttttaattttttatcactaactacttatttacacaatttcctccagtgcctgtgtctgcggttttagtgttaagcacaacgctgagcttcacattctacacacattaaaagagagctgtgctaatgagaacaaacctcaagatctagttttacaattgacatgtagtctctgttaacattttatcagagcagcccttcttcaatttggaaatggacccagcgaaaagtagaacgtttgagtatcctgatttttggactgatgccgagcgaatgaacgcattgtatgctccttttcggaatcgcaatgtcaaccctctcaactttgacacaaaactggacttttggaagaagatgatcgaaaaatggtgtttatttcagtcaaacccactcttcagtatcaaagatatccaaaccttcttccaacgggacacacggagacccctctgtttggcgcttgttgtagatgacttgttgaagaataaagaaataaagtcggtagatgaattcttgcaagagacacccccagaacaatcatggagtggttgggcggtgcattctttggtgaaaagtcctgcaagatgggcattcaccaagttaaaaactaatgtatttgcctccaattcaacagttcaggaagacactgagtttgtccatctgccatctttgaaggtgcttgctgaaaatatcctcaagtccgtcgaatttgatcatctctacgacatagaagagttgaaagatgtaatgaagaatgagcaaccattttctttgactattgtcaatttgatcgttcactacttatcactgcagagtaaagcaataaaaaccgttttagatggcaaaactctagtcaaatttgtaagtgacaaaggtggccagagcttgactatttcaaaggaggaggaggcaacatacaccctgcaatctcaagaacgcttcctaatagagaatattgaacagcttgagatggaaaaagaaaatttagtgaaagaagctaaaagttaccttgatagaggtttaagaaaattagctaaagtgcatctgagaaaaaaaatggagctagagaaaaccatcgagaaaagagtattaatactggaaaatattcaaagcttgatgagcagagtgaaagaagtagattctaacagtcaggtgttcgatacttaccagcaaggcgtcttcgcgttggaatccaaaattaaagaagctggtctcaacatcgataaaattgacgatacaatgggcaaaattgaacaggctctagaagacaatgacgaaatcgagtctacactgtctaaagtcataaactcgccgtcagatgctgaatatgaggctgaattagcggctcttttgctagatgaattagcgccagttcctgatcatagtccaacccatctaccatcttctctaataggaaatcaagttgaggatatgggcacatcagaggtagcacacaagccgaaaaaagttgcagctgaagcaactggatgatatttgcgagagtcatcgttcaatgaggattcaagatctttttcatcacttaaaataattaattctcatcatatttttagaatgaaaatgacaagcaaaaatcatgccacaaaattagttccgtatgtattctgaccacttcattttttgtgtatgccactatgtttgacctgaaagaggtctctttggaatatacaaaggtgttcacagggctaggaaagtctagaaaattgaaggcattatactgtattaaagaataatcaggaaattttataggaatgacaaattgtttctccatgtttctaatacttttgcttatagtttttacgacactagaaacaaaaattttatttattatcaagaatacttaattataagcgtatttttactcctatgtgcatgaacctaaaaactgtgaatgatttgtggtcaaaatttctccattattaatgaatcttagcagattcttgactgagagggtcagggaatcttgattatcttggtcagggttacctgaattttcaggaattatcctttctcagtgcacagaaactgtgtgctgttattttttcagaatatgtactgccaccttaaagccaaacattggagttagaatgagccttaatttaggtaattaatagtgagaatttctttgttaattttattttttgctatgtctgactttttaaattctggtaacagagaaatattcaatttagctcacagtaaatagtttccatgtacttttttcatgttgtcagttgaaaattttaataaagttgatttttttactgtg

SEQ ID NO: 45 - RNA, 2111 nt, Bemisia tabaci
  source 1..2111: mol_type = mRNA
mrnacggccccaatctccaggcgggagagatctgaggtggacttcgacaactcagaaatgatcagttcgtagggagccctcggctgaagtgctaacgtttacctgtcaagtgaagtgctaagtttcacgtgtttttacgtcgttgtttttggatcgttgaccttgtgctctgttttcttctgattattcttggtccccgggttgatgttcgacaactcgtaagaagactcatcgttacccgcggctgtgcctacctttcgtgatcggttacccctgatatggtagttgttctaagggaagcgggagttcctgctgttcttagtgggacacctcctcattgcaaaactggaatccctcgacatactgattgggacataaatgactctactatcccaagggtggtggagtacaatgggtgggaggagtgggcggacggtcactgtcggctggtgtaccgggccaactgcgaagaagcgcggcggcatgcgtccggctgggccatgcgcaacaccaacaaccacaacgcgcagattctcaagaagtcctgcctgggcgttctcgtttgctcccgacgttgcgttctccccaacggagactccgttcacctaaggcctgccatctgcgacaaggcccgcaaaaaacaacaagggaagccttgcccgaatcgacaatgcactggtcgattagaaattttagcgtgtagaggtcattgcggatatccagtgacacatttttggaggcatactgaccatgcaatattttttcaggcaaaaggtgtccatgatcatttgagacctgaagccaaatctacctcagaagctaggcggaccttgggagccggcagaagagttagaaatctagccgttctcctagctcgtgatgctgcacttagctcaaaattattatcagtcaaggatagagaccgtaatagatgtgagatagaacgtttgcgcattcctcagcctcccccggtttcggacagtgaaaaagtgtactcctgctcttgtcctcctttcgaatgcgtgtgtcaaagccgattccagtctttcaactggcaccagtcaaaccaggaaacctactggatgtcagaaaacgttcaaccggttccaaatcaaatcatcgagagtgacaccaataactacttgcctgagagcaacgccaccaacctcaacaccagcagcaacaatagcaataacaacaacaacaacaacaacaccaacaacaacaacaacaacaacaacaacaacaacaacaacaacaacactgttccctacgatttcccgcctttcggtaacgatttattcccggcagacgagctgttccaactggagcagccaatgcgagcgagctacagaggagcaccagaggaagacaaatgttcgccgacggtgctggacctcggtagcggaaccatccatcggacgacgttcaagtcggaaccggacgccgagccgtactggctcaccgcggccaccccttccgtccacaccgacgacagcaactgcagccagatgaagcagttctcgccgaatcacagctatatgaccaacttggccgataccgacgtggacgactcgagcgagatgagcacgcaccacctctcgccgggcgcgcagccgccgaaaagcgggacgaatttccatctgctcaacgccgaggagatccctttccagtacgtgagctgcgattcgtacaggatggaccaatgcgtgaatcagtacaggtcttgcgatgctcccgaagagttcaattttgcttgtacgatggatgcttctgtccaatatcccagtgagcaactgacgagtctggattcgacgatgatgacgacgtatcctgcgcgtacgggttacggtcagccgacgcatgatctcatggtacaaacccctcactcctgtgatgagttcatttcgctggccgatttcaggcttcctcagccgtcgacggtactccatcatgagacttacttgccatccaacgctcactcttgtcagacgcctggttattgtcatcagtgagccatgtaaaaatgtaaatttttcatttgtcaatatttgttgataccttgtgaattctgtaaatttcaatagtaaaaacctaaagtaattaacata

SEQ ID NO: 46 - RNA, 5690 nt, Bemisia tabaci
  source 1..5690: mol_type = mRNA
mrnattcttccccgagttgacaggttaacttcactgacaccttttcttccacatcatctaatcaatctggtctaatttttaattccacctttttttaatttctctacttcggaagagcctgccatcagtttgccagtgtgtcacactggcccctccaattgttattattttggcctgaacatggtttatagtgcaatggatcaagttgtgccaaatgaatacctccggaaggctgaggattttgctgacttggtttataagaagacaaaagtattccttccaactgcttcaagactgtgtctcatctcaactttcatcgaagatggtttgcgaatgtacttccagtggacacagcaaaaggagtatatggacatgtcatggggttgtggcagctttctagcaactctttttgtattcatcaatctagttggtcaattaggaggctgtgttttggttatagttcagaagcaagtccctgctgcgtgtggtgtgctctttttcatcgtagttttacagacttttgcgtatgatattctctgggatctgcatttcctattgcgtaatctagctttaattggtgctctactcctcgttctggctgacagcaaagctgaaacaaggacattgctggctggtgttccaacattagatacgaataaacctaaaaattatctccagcttggaggaagaattcttttggctttcatgttcattaccctaattagattagaaatctcatttttccaaattttgcaagacttatttagctctgcattaatgattttagtaatgattggctataaaacaaagctaagtgctttgctgctggttgggttcttatcattcctcaacttttatcataatgcttggtggaatgttccatcttacaaacctctccgagatttcctaaagtacgactttttccagacgttttctgtggttggtggtttgttaatgatagtgctacgtggtccgggtggtgtgtcaatggatgaacacaagaaagattggtagaggctacaattaaaggaaatcaagtctgaagaactcctaccaaaaaactgctacttctctcgaattgctcctcttcgctttgtctccgtaagcgtccaaatacttcttatatttaggattttaattttataaaggagtttattttcttaaagatgaattattgtactgtgtttcagagctgttttttataatcatattttgttctttaaactcagatttgccctccatcccatcttttttattgcacaatctaggcaattttaaacttttacttgcagtccaattttagatgttccctcgagtatttcgtgaatatgcgaattcctctgtgactgtgctcaattcaggagcaaaggtctacgttatctgtcccggtttacagaattttttactcaggtttgccgatctcctacccatgcgtatttcaaatgttaacaagaaaccacatccattaataagtgctattcttaattgcaccataagttctgaatccattgataaaactcttgtcaagggatttataatgagctaagttttcttaatttctcaaaaacaatttgtaggtttggcaatcagtatgcgaccagtatatgaggtaggggaatatttttgagacggctccggaaaaattctttttctgagtgtcttgttggtcgcaaacgaaaacagaattaagtacaattgaaaggattaagaataagctttcaattacaggtccggaatttttgagcttcaatagcttttaagaattaaaacttattgattgatttaaactaattgataaaacttacttttttttttctaatgatccatgcagacccttcaagaaatcttgctcgaaatagattttataatcttttggtgctggattcaaagttattcccaaacagtaatgtttttctgggagacccatgttatttacatcataatcaaggcagtattaaggtgacatctatttcaaaggccttcttcaacctcatacagtaataatgtaaatcatatgagtctttctgaagaaataatttgttcatggactatgatagctatcatgatcggtttcaacacattttttactttcatgccctaccaaacttctatgtcttcccctctttctactatattttttatacagcctagaggtttggcttttacggatcgtataaatagttataacaagatatttatgtggaatggtgcaatctcttcttcttggatgatactgagatggaaaaaaattaaattccctatgttcgctgggaaatccagggtagcccaaatattaattcttcagtcatctacgtcaattttacccgagtctgctttaagtttggaaccaagtgaactcccctgagaaagagaaattaatatgaggcccttcctttcagtttgagcaaattcagtggtatgtaagaacaacttaacatggcttgagtacctttaagattttgagagcatattccaagactttggaacatgtgctggaatgaatgctgccttgagtgatagtgatattccttcctctatcaagtctacttctatagatcctgcatcaaggtgatgacatatgttccatcgacaacagaactgttgtcattagctttcacagattgcagtatgcacccggtgtacacctcaaaacaaatgtggcatgccccttgtttcggactctatatgcgctatctggctgatggaatgaattttgaaacatagaatatattttccattctaagcaaaacttaaacccaagtaaacgaatctaatatctgtttattgtgtatcagtgttcgacatggacaacatctccaatacttacatcatccctcatctatacattgtctctggtgtcaaaaccacttaagatctctctcataacaagggaaggcagttttctgtaatttaatttttaattctattaagtttatcgtgtgacaattcattttgtctatttgacaatttaatttttaattttaatcatcttagatgtacgtacgttcttgctgttattgacagctgccaaattttgttagctttctaaaatgtattctcacaaataaccggattctggttctctctttaaagttttgcatgtctatttacatattatgtgaatgagtaggtgatagcaactgtcctttatcagtaaaatattcattttccatgcctggaggtcagtaaatacttattgtctgccccagtttacttttatttggcacactcatgcatagagaaaactagtattagtcttgaagtacatcaatggctaaagaagaaaaatgcaagtcactaactgcaactttgggaatctctatttttgtttaattttttccagagaaaattcaccaacagaatgagacaatggcaaagaagttttacaggattaatgtaaaattttgtgaaaaaacaaaaacatttattaaatagttcaaaaaagcacttctgaggtgaaaaaaagctaattaaaatctgactaaccaaaagctgacagtcgagttgatatagcagtgcgaaacctgaaactgagctcagccaatcagcaaaagctgttgccccgctttgttacgtcatcagagccccccctctcccaaatatcgttttaaactgatcgcatttttggcattttcaaaacggattctctttgctaatttgagtttttaaagatagaattcctagaagctcggtttactccgtactttaaaaaaatgggtgccactggcccatttcttgacagctcctgcaaattgttcaaaaatattcacagaaagttgcaaggagaaatttaggttagtgttcttatagtctgtttgtgtttccataatcagagattcttaaatgtcgagaatattcgaaatttttcgacttaatctatcgatgtgtgttctccttgaaacttttggagcctgtgaagtttgcttatccatatagcagtgcgttcatagttcatgtttgtacaaatgaggcaatcgtagaagtcattaggttgaaaatataatgaaccttttatctttctgcctttaatttgctttaaatatgctcatagtacaatgacgtagcctcagaagtgtttttgtggtctcaaaagtcccttgatgtggcctttttttgccattttggcataaatattacattcctgtcaacgttacacctttgcctctccagaatcatcgtaatatataggaactgaattttttttttttttttgtatgaagaaactgcaaagtgtcactatgatgctgtttaatatcatttctcagagtttctgaacaagtataaatctccattggttgttaaaactgtgactaggactggaactgcagattttctcttgcctcataatgataaagtgaattcggcaggtagaattgtaatgcgtaaattcaatatcgatgaatggtaaagatacaattctttattatttaaaaaaatacctgtcaaaacagatataaccatgaggcagtagatcgtggataccaccttacgcaccacgcctggaccactacctgacatttgattgacgaattgaatggataactggaacagaattaagagaaaatcggagaattggaagacctttttgttttcctggactaccatccatgccaaagagacaaaagttgaaaattaccatcagcagctttgttgctggttgcacagtacttggaatcaaacacaagaggacagtgtgtgaaaacacctttaataagtgaagtaatttcaccatttggttgggttcttcgtcttcaagcacacttgtatctctgaataaactagctcagcagccattgctcctcctttccaaagcatttaaactgaaatcggtcattacagggggacaggtgattgattctcccttttaaccatcaaattagtgcaattgaatgagtatttactgttacacttagttttctctttcctttttaaaaatgtatgtacaattaagatgaaaggactgtttttcaatttgtttatatagtttgttttattttttatttttaaggtaaaatccacaaattgttttaatttaagaggtaatgactgcagtaacagcatttcttggaatatattcttttcaggtccgtgcactttaacaattgatttatgtccgcatcaatggagttggccaaatcatattccattgttattatttttcttcctttttttgtatcctcaataacactgtatggtttacatcttaacttaagaggaattttagttgcttctcaatccgataaaaaatgctgtgttgagcatagtaaataaagaacggataaagttcaaattttgaaggcagttaaaaaagggaggtttacacaggtgtattcaaggtagaaaagatatttctgcagaaatgctattgctggatccagcgcttcttttccatttagagaaccagcttgaatttttgcatctgctcaagtcttatatcttaatttatcagattttctctcatatttcttaattaaaggaaatcatttgctgctctctcatgatctgtaatacatttctcttttttcttcttctttctttcttaatgtgtacagcaaaactgttgaataaataaaattttaacgaagtaaaagttaattattaaacatagtaagtaatcgggttatgtttcatatgatgtccctcagttattaggtttcttactttaattaaaattctagcaatgttaagta

SEQ ID NO: 47 - RNA, 4720 nt, Bemisia tabaci
  source 1..4720: mol_type = mRNA
mrnattgagaaatattgataagcttgataagtattgctaattgatctgtgattcccatgatattacacggatttttcttgttcctattattttgattgatagtgagtgttagaaagattattgtgatcatgcatttcgctcaatctcacagcctgcttcgctgtaaatgtcaacaattttttccttcttgtagaaattttttgaaaactcgaatttttgataaaaataactcttttgccaatgttaccgaaggactcaaacatctgtacaaaacaaaattgttaccactggaggagaaatatttctttcacgatttttatctccctaaaatcacagatcaagattttgatgctaagcctatgattttgttaatgggacagtattccaccggtaaaactacacttatcaaatatctcatcaatggggattttcccggaatgaggattggcccagagcccaccactgataaattcatcgttgtcatgcatggagagaaagaaggttatatccccggcaatgctttagtcgcagattcatcaaaacctttcacaccattgtccagttttggaaatagttttcttaatagattgcaatgctctttatcaagttcgccgagacttggtgaaatttcattcatcgatacacctggtattttgtctggagaaaagcaacgcattgacaggggctatgattttaccggagtcctggaatggtttgcagagcgagttgatcgtatcatccttttatttgatgcaaataaattagatatatccgatgaatttcgacgatcaattgaaattttaaaagtgcatgatgagaagataagaattgttttaaacaaagcagatagaattggtcatcaagaactgctgcgagtgtatggagcgttgatgtggtcccttggaaaagtactaagaactcctgaagtatcacgagtctacgtcggttcattctgggatcagcctctgcagaatgatatgttcagaaagttgtttgaggatgaagaaatggatctcatgaaagatattcagtcgctacctagaaataacaccttacgaaaactaaatgacataagtaaacgagcaaggcttgccaaaactcaggcttatttaattgcagaattgggtggacaaatgccaaccttcaacattttctcgaataaagccgcaattcaagaaaatttaatcgacaatttggcaagtatgttccaaacaattcaaggtcgatatcgtctgtcaccaggtgattttcctcaattagaaaaagctcaggagaagttgagagcatatgatttttccaagtttccgtcccttaatgaagatctcatcaatgctgttgatgaaatgatgatgaaagatctacctcaaatcatgtccaacatacctgctgaggagagcaaacaaaatgagttcctaacaagtgctggtctagaaaatacaccttttggttatgatcaaggcgttggtatcaatgaaggcaaaagcgaacgtggatgggtcgtcgaaaaatatagacaaaaatatgacagtatttatgactctttagctcacaatgataacaagattgttgtatcagttgcacgtgaagaaatgatgaaatcaaaactaccaagcaatgtcctgggcaaaatttggaatttggctgatgttgacggagatggtgttcttgatagggatgaatttgccttgtcaatgcatttaatagacatcaaattgaaaggtcatgagctgcctgacaagcttccagagcatctaataccaccgtcaaagaagaaccatgctccaagtagaccctaggaaagtttggactaacacccaaagtacagaacaaaatccaagtatgatagtttatcagtgctccaagtacaatccaaaactgtaactacttattttatttctaatgggtcttttatcagctgttccattatcttttgtaataatagcagcagacagttcaggcaaactagtctttcctcctcatctaccaagtgatctactgaaattcaatatgtattagcacatgcatagagaggtataaagataagttttctgcgtctatcctccaaatggttaaaaggacaaccattgcaccttaaaaaggtttttactcaaatgaagattttaacatttttatttacctttttcatctttggaaaaaaaataatgataatagtgtaagtgcccatggtagctacactaaaaaattcaactcaaccttttaactttgtgtcctttgtggttaagtttgaatcgtttttgaagaatgtttatgatagtattatgaggctgcatttccaaataattttaattacataaaatgaatacattttagctattcaagaattttttaaaaaaattttaggtcaaaatctaaaagtaatttccaatattttttttcaaatttctgtggagatattctcaagtgcaatgtaatgtaatcagacttagtctccaatatttttgcctctccttgctttatctctcttctcattatttttcctgcaattttctctgtaaccttataaaacttaaaatttaaagaagaactataaaaaaattctgggtatatttcttctgtacatggtatttttccatgtaaccagatattgttttgcataattattaaattatgtttgttattttcaaaatgttattagtttgtataagggtcactccatatcattcaattgcgttgagactcgccatctcagaatgcttcacattgttatgaaactttatttccaagaagttaaacaggatgtatctgtgtgtattgagaaatctgtaaaaattccatctgcccaataatttgaattaaaatttggaaacattaccatcaaaacgcttaaattttgaaaaaaaatattttccaaggctctaccgcctttctacggaaacaaatgtcttgtaaatcatcataattttttcagaatattcattgaaaaatcgatttccagcgtgcttctcaaagcaatgccctaatttgagattttcatacaagaaattgttacctgggtttgtcaatgaaaattttgtctgtctccctcatgaaacgatgggaaaaataaaaaaaaagaaacttggagataagtcaaacaaaatgtagacattttaaataacagtcggttcaggttcacatcgtcctagaaaaaacagagcaatggtcagattctaagatcttcaattattcatctattgcggcctctaaattttttaagtctgggtcattgaaggcttcggggttgcagggcttggcggcttccgaggagagatgagcaattttgccacaggaacagaactattttgcaatgcgcaggtccaatctttctgagggctggtatttccttacaggcattctgagggttattccactttttcaggtttgggagaaattaaattaaaaagttaaaaaacctagattctaacctgagtcctggttattgtagcttgatgcaaacctgaaccgatggttatgaaaacctctaaattttgttacattttggagttcctaattttttcatagcttcataatagaaatcaacaaattctgagtgttttagattccatactcaggtgaattattatattttgatggtgacgttcgtaaatcgttttccaaattgctcgaatttcaaactcaccaattttttaaagcaggaagtccctccccattttgcctcaagttttaaaattttattatctgcattatcggagcattccatgtttcagaacgacttctgctcaacttgtggctgctaaagagaagtagaagagttgaacgaaaccgagagcatctgatcttaaaaatttttagaaccaacaatatgaacagaatgctttgtcaaaaaatttaaaaagtgaaatcacaagaaatcattgagttttgagaaagtgatcgcgtgcttggttggaatggtcatgagtaatccctgaaattattgattttcgaaaaacaatgataatattttgtacaaacaaatttgttttgtcaaataaaatatgttataatttttttacaaaaatgaatgtcgtgtagcatttgaggtgttgaaagaaaaaaaaatcagatgatgtcattctaataacatttatgaacacttctaaaagtctttgacaaatagagccatcgtacacaccacgagatagatgaagagctgtaaaaaaagtattgaagtcagtagaagtataaattccgttttaaattttgatggtccatgtgtcgcaggcaattagcagtcgccggaaatttgcaagcggttcaaacgctgtttcaataaatcgcaataatgcacatcggcataatgcaatttttaagggttaaggtcttcaaaattatgatctcggcttgaagcgccttcattctttgtgatactctacgctttgtcacgatgttagtttagttgcctgccccaactaatgtcgcgaagttcaatgcacgctcctctgagtgtgcatatttctgtcatgttttcgaagatggaaaagtgtctattcacattacaggcaacacaatcagcactctaatcttattcttttatttttgaattctatgattttctatatttattcaccactggcttgcaaattgccggcgattgctaattgcctgcgacacatgcaaaatttagaagagttattcgaaattgacttcgttgcctgttcatggatcctaatgtaagtttgatgtattttcttagcacaaaacatgttgtttctctgga

SEQ ID NO: 48 - RNA, 2901 nt, Bemisia tabaci
  source 1..2901: mol_type = mRNA
mrnatgtttacgatcgtgtctgcgattttgttcaatgtgtaccggcttcttttttccagttttatttggaattcttccgtcaagtgatgtgttaaccttttagtttttatttctgagctgtattaaaatcacagcacaatgacagaagacaaaccggataaggacaagaccgagaaaacggaagtggaatggggaagtgaaaaactatgccaagcgcaggcagcgatcaatgaaaatccttgggatattgaatcttggggtattttgatacgagaagcccaaaccagatggattcatgatgtacgccctttctttgagcaacttgtcaacacttttccaacaaccgggcgttactggaaaatttacattgaacaagagatgagaggcagaaattttgaaaaagttgaaaagctttttcaaagatgcctaatcaaggttttgaacatcgatctgtggaagctatatctcgattatgtcaaaggaacaaaagcaagtttagcaacttacaaagaaaaaatggctcaagcgtatgattttgcccttgataaaataggaatggatatcaactcctttgatatttggaatgattacgtaaactttctcaaaagtgtagaagccattggatcttatgctgagaaccaaaaaattactgcttgtaggaaggtttaccaacgaggagttgtgaatccgatgaataaaattgaagcattgtggaaggattacatagcttacgaacaagtcatcaaccctatcatagctgaaaaaatgatgatggagcgaagcagagattacatgaacgcacggcgagttgccaaggaattcgaagctatcactaagggtctcaatagaaatttgccaagcgttccaccaactggtcacatagaagagttgaaacaggtagaactgtggaagaaatatatcgcatgggaaaaatcaaatccgttgcgttcagaagacactgccttagttacacgcagggtcatgtttgccttcgagcaatgtttgctgtgcatgggacaccatccagatgtgtggtatgaagcagctcagtatttagaccaaagttccaaaacactctccgagaaaggggatgtgaatgcatcaaaactatttagcgatgaagctgcaacaatttttgaccgagcaacatcaactattttaaagcatagtatgctcctccactttgcgtatgccgattttgaggaaggcaggatgaagtatgagaaagtgcatgaaatttacaaaacgtatctggaactgcaggaaatagatcctactcttacttatgtgcagtatatgaaatttgctagaagagcagaaggaattaagtcagccagatcggtgtttcggaaagcaagggaggacccccgttccaattaccagattttcgtggcagcagccttgatggagtattattgtagtaaagataaaaatattgcatttaggatttttgaattaggactgaaaaagttctctcacacgccagaatacctgttgtgttacatagactacttatcacatttgaacgaagataacaacacacgagtgctctttgaacgtgtcctctcatcgggtagtcttgagtctgaaaaatctgttgaaatttggaataggttcttagaattcgagtccaacataggtgatttaagtagtattgtaaaagttgaaaaaagaaggagtgctgttttgagtaagattgcagagttcgaaggtaaagaaaccgcccagttggttgataggtacaagttcctgaacctgttcccttgcacccctgcagagttaaaagcaataggctacaatgaagtcactcaaaatatagccaagtcattccaagctgccaagtctggcgggccgatcatctccagcctggacgtgatggatgacggagatgcagctcagagaaatctcccgaagccagacgtatcacaaatgattccatataagcctaaacgaaatgcattcatcggtgaacatcctatcccaggtggcagcttccctccacctcctgccgttgctcaactaatggccactttgccaccccctggttgttttcatggaccatttgttgctgtggatcagcttctggagatatttgataaaatccaaattccagataaacctcctgttccaaaaggtgacaacggttgtgatactcggttatttgacttcaccagctctatccactggatggagaacgatgattcagtcttaaacagtgggatcaggaggaaacggaaagcaggaggaggggatgaaagtgatgaagaagaaaacgtcgctccacctgtctacgacatttatagaataagacagcaaaaacgagtcaaatgatctttcatttatcgcagtgacactgctttcagttgatcaaatcgtaatatctctgacttgctctgtagcgaatgctgttggacacaaattttaagtctgatgtgccattatattttgtattgcgtcttctacgtaatggtaccattggacaatatggtaaactcccatgttggatacatgaagagtctcctacctagtttagggggttgaaaacctgatcttaaattgttgctcctctgatgtaaggcgaatctccttttttacacaagctttgaacagcatggaatcgtaaatcagactgttacatcagaggagcgataaaacatgtcattaaattcagttcggtaatccaccatatccagagaaataaatttgggttctttgttaatatatctgttttccagatcatgagcccatgtaaatctaaatttttagttgtttcagccaagtttcaacaggcctaataattggagaatgttggcctaatcagtaaaaggaccactaaacagggtatgaaattatgcaccagaatacatataaaatacaatggacacatcaaaattttccaaa

SEQ ID NO: 49 - RNA, 3655 nt, Bemisia tabaci
  source 1..3655: mol_type = mRNA
mrnatgtcttcttatcgtttgattggtggtaaaacaaacaaacgtctggtcgttctcacctgtctgttaaaattaatattgtgaaatttctgtttaccgcagtgattgtgaatagtgaaccccaatcatcaagatggctttgaaaacgctcgtcgggcaaaaaattatgaatgaagctatcaagcagaagaagaagactgggaaagatgttgagtggcgggtgctagtggtcgaccagctcgccatgaggatggtctcagcttgctgtaaaatgcatgaaatctctgctgaaggaatcaccattgtagaagatttaaataagaagcgggagcctctaccaacaatggaagcagtttacctaattagtccttgcgagaaatcagtgcatgccctgatgaatgattttaattatggtagccgtactatgtacaaagctgctcatgtttacttcactgaagcttgccaagaagagcgctttaacaaactttgccatgccccagttgccaaatatattaaaacatgtaaagaaattaatattgcatttatcgcgtatgagcagaaggtgttctcacttgatactccagaaacattccagtgcttttacaatcctgcatattccagcaaccgcaatgccaatatggaacgtattgcagagcaaatcgcaacattatgtgcaactttgggcgagtatccctcagtaagatatcgcagtgactttgacaagaatttggaattggcgcatgtgatccagcagaaattagatgcatacaaagctgacgaaccaacgatgggggaggggccagagaaagctcgctctcagctcttgattctagacagaggctttgattgcgtttcaccggttctccatgagcttactcttcaagctatggcctacgatttgttgccaattgaaaatgacgtttacaagtatgaagctaccgctggggctccagagaaagaagttcttctggatgaaaatgatgagttgtgggttgaattgagacaccaacatattgctgttgtctctcagaatgttaccaaaaatctcaagaagtttatcgactcaaaacgaatgccccaaggagacaagcaatcaatgcgtgacctctcacaaatgatcaagaaaatgcctcagtatcagaaagagctgagtaaatattcaactcacttgcatcttgctgaggattgtatgaaggcataccaaggatatgtcgataaattgtgcaaagtagaacaggatctagccatgggcacagatgctgaaggtgagcgcatcaaggatcatatgagaaacattgtgcctgttcttctcgacaaagctgtgtcaaattatgataagttgaggattattattctgtacatcttatcgaagaatggaatatcagaagagaatttgaataaacttattcagcacacgcaaatttcaccgcaagaaaaacaggccattgtaaatctagccaatctgggagtcaacgttgtaacagatggtgggcgcaaagtaaaagtctaccaaccacctcgcaaagaacggattactgagcagacctaccagatgtctcgttggacaccagtcgtcaaggacttgatggaagattgcattgaggataagttagacctgaaacattttccattccttggtggccgcgcagcctcctctggctaccatgcacctaccagtgccagatatggacattggcacaaggacaaaggacaacagacggtgaaaaacgttccacgcctaatagttttcattgttggaggtgtctcatattctgagatccgatgtgcatatgaagtcaccaatgccatcaagacatgggaagtcatcataggatcctctcacatactaacgcccgaagatttcctaaacaaccttgcaaatctcagtgcataagtaaattctttggagaccgagtaagtatcgcttctctgtgataaagttctaatgtcgcaatagtccggaaccgccgttcaagtgtattcaagttactttgatgatttgatgcaaatccattgttttcacaatattcagtgttgttattgttaatctattcattttattatttattgtatacttcatttatatttatttatttattcaaattttatcataattgcacggacctagatcctaagtatcggcaatgtggatagggagtcaaaggaaacaagcgcttggaaactaccaaaacttctcgtaagtaaattattccagttgtgtctataacgttaaatttgcattcaaatgctaaaaaaaatatttcatggatttcaaaaaaaaaaaaccgaagtgcagaaaattgattgagtcaggtgagaaatgattgatctgttagtctcccattgtttgtttcccaggcttttattcacctacctccacagctgctgatcattagtttaggttttaggtactttaatattattctaataccattaagttggttttgttcaaaacctagcttttgtaactatccgtaacgattaagttaattaccgagtaccttaggtagtagcttttgttatttgccgtaatctcattcattttcatgttaatatcagcgtacaccctgtcatcagttaacatttgtctactattttcttctttttcaacatagtaaccagttctgaggaaaaatagccgaaattagaattaaattggttcgcaaagcagagaaatgcatactgtttcagtcaaattacatctcatattctagttatgtgcgatcctactagataagttaattttcagcttaacgttttgataaatttttagttttccacaatatagtgaagcctttttcttcttgaacgataacttttcgttggttttatctgatatattttcagttaaatccattagatttaaatattccttcaagctatggacgttaagatgtgtaaaagagacaaaatagtttatctaggaaggcctgagaatttttagaaaatcgtagtgcctctgttaatgctgatcattacttttttctcagttgctggtgtcatattttaggtgtataagtttatcagccctcataattcaccctgttcccaagaagttgtttcaattcttcttgggcttataaccaatgacatgcttcatttcatgatatgcacttgacactgagtttaagcaaatgcaaatgcaaaagttacacacatgtaatgcacttaatgattgattcacacttaaggaaacgctataaacaattactttataaagttgattgtataatcttacaaagttgattttctagtatactacaagtgaaatcatttgagttacccaaccatttgcatcttctaatttcatcaaactaatgaagcactggtttattgactagtatcagatgtttttcttgaaaatgttgtactctatatagagaagtagagttttaaaccatgagattttaatggtcacctttgtgatattctatgtatttgatgatttgcaaggtttaattctcatttgtggacatttttctacaaaaatctcttgtcttcagcacttattaacaaagaatgtaatcgtctgtcggaaagataaagccttaaaagctagagaataagaaaatatttaaatttttagagtgcacaggagctaacttctaatgcatatttagatctcaatagaaattgaatctcgagagcttgatga

SEQ ID NO: 50 - RNA, 2689 nt, Bemisia tabaci
  source 1..2689: mol_type = mRNA
mrnatgtgtgccgctgataacttgtcagaagccgacgtgtaattactgtaattctgcaaaaatcccatctcaagcggcttcttgtccaggtagatcctcacgaattgtaatttcggctcctcactaaagcactgtgaagttatagttcatcctccgtcttataaggatcctgaacatcaaacatgtctccaaccaagcagtcacaattgaacatacattttcgcgtcacaaggagtggcactccaaaaggcaaacgcaacaaagagaatgacaatactccttgtaagaaaccagccccagtcgctaccccctacaagttaacctccgaagcagaaaattacgtccacattgacacccctcggccaccgaaaaggccctactcttcatcaaagcagactgctgaagacatttcaccacccaaagaaaatggatttaaattggcccgcaaagtccttcatggaagtgccacatcatccttacctgggcgagacaaggaactaaatgaaatgagatcatttttggaatcccatttagaaaatgagacctccggagcaatgtatgtttctggccaacctgggacaggaaaaactgcatgcctcacacatctgttgacagaagaaaagataaagtcaaatttcaaaattgtgtcggtgaattgttcctacatgcagtctgcagttgcgatttatggtaggatatgtgaagaactttctctgaaagtttccggcagatctgaaaaagaatatttgacgaagattcggaagtacctgatcagtgaacataaaatgattctattgatacttgacgaaatcgatcaattggagaccaagaagcagaacgttttgtactcaatttttgaatggccctcattaccggatgccaagctggtcttagttggtatagccaatgccttagatttaactgaccgagttttgccacgactgcaagccaagcttgaaaagcaaccgcagctgcttcactttgcaccgtacacaaaacaacagattattgatatcatttgcgaaagatttaaagagggtaatatctcatatttatttgatgacaatgctttaaatttactcgcggccaaagtagcagcagtctcaggtgatgtgcgtaaagcattggatgttgctagatgcgcagtagatttagctgagaacaaatccaaaagctctgttttacaaccaagctctaacaatgtttcaagcagcagcgttgcttcccttgacaaaattgaattaaaagaagtcctgacgaccatcaattccgtttacggaacgagtcaagttttgaacgctgtgactggttcgcaaccatctctacctcttcagcaacagttgatagtttgttctctccttctcatgatggaccatgaaaccaagaaactggacatcacattaggaaagttgtatgatgtgttccgcaaagtctgctcaaagcaaaggcttggtggtgtcgatttatccgagttcatctccctttgcgatcttgttcaagcccgaggaatccttaaaattcacagcaaaactcgtaatcgacagtcaaaggtaagcttgcagtgggacaaggaagaactgatggcaattttacaagataagacgctgctatcagatatcctagcagataagaaagtcctgtatgataagtaaagagaccttcaatgaatcaaaattttaggttaattactctgacattcctattatttaattatttcgtcctcatttgaggagttgaatagtattgaaaatggttttatacttttttatcgaggaagtatccttagaaatgttcgcatgatctcgactaattatttttcgtgcatttttaatctacttttaaaagttgcatgcctgagtgaatgctcaacaatttttgtttaaaaatgctcaaattgtttagataatattttatttaataaaacaggtgacagtcaagaaatgaatagaccctggaggtcataaaattcacaaatagtcattatcaaatgttcactcattttaaaataagaccaaaaagtagagacaattttttcttcctgagtcaaaagacaagaaaaacttgaaatctatttaacttgtcagtaggtattaagttgtaactattttatacagttacattgactttcattaattagtgtaaataattagggaatatgacccatctgcgccctgtaacctcattagtatttggcacttttagatagtttgtttgacttattaagatacttatcctttgaattttaaattcatctgtactccgaaattttgatgcatttacctctctagaatgtttcggctttaatatgattcttcagaaaacgtaggttaacatcaagatatcatgcacactcgaataaaataccgatttaatgttcaagttcaagctactattgaatctgttacttcctgaggtatctatcagctattttctctgtaaaagtggccttttaaaatccttgattgaaatgacaaataaccaaacaaaaacgttcagtttgatttaatcaaattaagagtttttttagttcatgtttggatagttgtagcccatgtaatctaatgttcctcaaaaaatattttggcgaaagaaaatcgaaatttgctgctgaacaaaataaagtaatggaaaatgtatacacaaacattttattgcttcatctgagagtgcctaatgagctgagttcgca

SEQ ID NO: 51 - RNA, 2229 nt, Bemisia tabaci
  source 1..2229: mol_type = mRNA
mrnaattcattgataatggctgaaccttcaaagtagaataatgtttgtgtggtttgtgccggttggcttcgttcgttaaattattcttcttgccgccctaataataattctggagcataaaaatggcctatagtgttaatatttctgtggaggccccaattgaaagccaaattcaagaaatcacctacgatggacaagaaatataccaggcgcctctctcaatgtcagagaatctggcgaaaatggcgcaaaaaattgattttgctcgtgttagtcctgacaccttcaaaagtgaaccaatggaaacagacaaacctgatgacgatgcacagtctaaagattctgccgcttttcaagctcctcaatgtctctgggactctgtgagaagtaaattaaggaattcacttacagagttgtgtgttttacaagatgtgttgaccatcgccaaagaaaaacgctatatggtcctggatccagtacctcaagaagttccagaacagaaaccaatggctcaaatctatgcaaggaaaaaagctttatcaggagcagcgtccgtcttactcagtgccgctgaaagattgagaacctctcaaacagaaatggctcgtaacaggacaaccccagatttccacatagagttattacgactgagacaaaattggcgattgaagaaagtttccaatgctataattggagatcttagttacagaactgcgggatcaaaattttctcagatgggtatgtttgaagtaacaaaagcagaagatgatgcctcaacatcgcaagcctccagtcctcctccatcacctggacttgggccaccaatgccaccaaaaccaccttcagccctcagagtcacagttccatcagaattacagggagtggcatatattatggtattatgtcgaaaagatcaagaagatttaagtgtatctgctaatcttctgggctcgtctgcaccaagtgcaaatccagatgttcattggcagcaaaaacttgaagcagctcagaatgtattgttctgtaaagaactttttaatcaattagccaaagaagccgttcaactccagggtcccattccacatatggttgttggaaatcaaatcatggccactgtccttccgggaattcagctgatcatcggattgtgtcatagtggaggcggtggagaatctaaaagaggaatcgcccctcctccgccaaaaggtgatcatgatcatgtgctggaacattctcttcatcaacttcttagagaggtgcaccacaaaaatactcatcatccgttcccgcatccctccagtgggcccctgggacccagcaagaagagagcattggcaggaccaactgctgcggaccggtaccagctgttagagatgaccaaaagtaaaaccatgcttgaagaaatgatcgagcagactcaacatttcttcatgagactgcgagcagaatatgtattagatacaattgcgaaagaggtaaaagaccctctcattgtctcgcactggaatgcgttaaattctccaacccagtcttgtgtgaaaatcaccatcatcactcatggatatgaagtcattggcaaatcctctcttattgttcatgtcggtcaaaaatccatgaagtgtgtttgcagagatgggaaagtgatgcatttatcctacgagccacaagagttgcgggacctgattttctgccagattcatcaacaccaaataaattctgtacaagctcttggaaggtgtatgggatggcagcaccttgcgaacagcccccatttaggaattggacctgtcgaacccctaggcaacgccagttcttgcatcctagcctctccaatgggtgacaggattattgccattcgttgtgcaccacaagcgggacctcaagttttcattgctcactcgccgcgaaaagatttcttcagtggacagctagtcaaagagcgcaaatgggaaaacttaggtgggcctttcaaagaggttcgttgggacaaaatggaagggaaaaatttcctgaacaaaatggaactgctcatggctagtttaactagcaactcctaatcaacttcttccctacttactaaaaagcttcagcaaattttatacttaaatcatttgtatcatatgtgtaatttaaatgtaaataatatattttgtaaatgttctcaggttgcaattaaatggctctttctcaatgtaattttgtatcataataaaaaaaatactaattgtt

SEQ ID NO: 52 - RNA, 7272 nt, Bemisia tabaci
  source 1..7272: mol_type = mRNA
mrnatttcagttttctaacctataagtaaattccaggtttacttgaactgattttgactacggttctgcgattacgataattagaactgagttgtgtcgtgtacacttcacttcaatctcgttattagtttggtagttgtaaattaagtaaattacttaaatttttaaaaaagcttcataaagttgtcaccatgccagctgaagagaaaacatcaggcaaaaagctgtctaacaaagaaaagaagaagttgaaactagaggaggaatttgaaactaagccagcaaagtcgaagaaaggccggaaacatgatgactcagactctgaagtagaaacgtctcagaaaccagcagtgaatgatgatgaagaaagtcaagcatcgggcaaacctcagaagaagttatctgccaaagaaaagaggaaattgaagaaagggcaaatggatgatttcaatgactctgattcgatatcttcttctctatctggagttcagaaagctaaaaaattgtctgcaaaagataagaaaaagttgaaagatgaagaaggattcaggagtaaggagcataaaccaaccaaaggaaagaaaagagatgatgatagtgactcagactcaaacgtcaaaaaatctaagtcaggaaaatcaggtaatgtttttgcatcttttattgagtcagatgaagatgagcctgttgcaagcttagctcccaaaaagtccagtgccaaagaaaaaaagaaaattgagaagaagaagaaaaagctagaaagtgacgatgaaagtgatgattttagcatcagtaaaaaagattccgatgaagattcaagcgcaacggaccgcataggaaaaatacccaaaaaactaacagcgaaagagaagaaaaagttggaaaagaaaaagaagttggaagaaagtgctgatgaaagtgatgatatagatgtcattaaaaaagagaattctaagaaaatagaagagtctgatgaggattctgatgattcaaaaccctcgctcaaaaaactatctgccaaagaaaagaaaaagttagaaaagaagaagaaacaagcagtaagtgatgatgatagtgatgatttggatatcattaaaaaagaaaaaactaagaaagtggaagagcctgatgaggactcagatgcctcaaaacctgtacttaaaaaactatccgctaaagaaaagaaaaagttagaaaagaagaagaaacaagcagtaagtgatgatgatagtgatgtagatatcattaaacaagaaactgcaaagaaagcatcggactctgacaatgaagcttccactaatgcagcgcctaaaaaactcacagcaaaagaaagaaggaaactggagcggaaaaagggatgggaagaagaggaagaagaacaggatgaggatgtaacaaaacccaaagaagagaaaaaagtagaggatgtcgcagaagagaaaggtggtaaaaaactcaatgccaaggaaagaagaaagatggagcgacagaaacaatgggatgaactcggtgaagagaaaaaagatgttgaaaatgttgaagataaagctgagtccaaacctgttgaagtgattgaagcagcaattgaaaatctgcagataactaaaggaaaacagaaagagaaaaagaagaaaaaagacggtggtaaagagaacgaacctgatgcagagttaagtagcaaagaatccattaaaaaggatgaaaaagttgagagtaaaacggtgaatgatgttgatgcattgagtgcaagtttagatagtatgcagctgaaagctaaggaacccaagaaactgtccgccaaagagaagaaaaaactagaaaagaaagagaaaattgaagcagatttcaaacggcagatgggattacttgacaccgaagaaggggagaagaaaaatgatgatgaaaaattagaaatcaaggaagatgcgaaaaaagttgaaggtagtgaagcagatgtaaatgaagaaaaagttgaaaaatctaaagaaaagaaaaagagtaaaaaagaagtgaagttcagtgagccccaagaagaccataaagatgaaatagctgaagaggaagcttccaaagacgaatctgttcctgaaatttcagaggaaaaaggagagaaggagaagaaactcacacacaaagagaaaaagaagctgaaaaaagaaatggaatatcaaaaaatgatggagttaacaacaaagaagggtggacaaggtcatagtgagttagactcaaactttgctgtctcccaatccttaaaatcagctaaccaattagcagcacttgagaatgctgtagatatcaaaattgaaaactttagcatatcggccaagggaaaagacttgttcacaaatgcaacgcttttaattgctgcaggccgcaggtacggtttagttggacccaatggacatggtaaaacaacattactcaggcatcttgcgactcgagcttttgcaattccgccaaacattgatattctttattgtgagcaggaagtcattgccgatgatacattagcatatgaagctgtattaaaagcagatgtcaaacgaacagaacttctgaaggaatgtaaagagctggaagaaaaaattgagaaaggagatttggaagcacaagaaaggctaaatgaagtatatgaagaattaaaagcaattggtgcggattcagcagagccacgagcacgcagaattctagctggtttaggattttcacgagccatgcaggatcgtccgaccaacagtttttcgggaggttggcgaatgcgtgtctctttagctagagctttgtttgtagaaccaactcttttgttacttgatgaacctacaaatcacttagatcttaatgctgtaatttggctggacaactacttacagggctggaagaaaacactcttagttgtctctcacgaccaaagtttcttagataatgtttgtaatgaaattattcacctagacatgcaaaaactattctactacaaaggaaattacacaatgttcaaaaaaatgtttgcgcaaaagcggaaagaactaattaaagagtacgaaaaacaagaaaagcgtatcaaggacttgaaagctcatggtcagtccaagaaagctgcagaaaagaaacagaaagaggcgctcacgaggaaacaagagaaaaatcgtagcaaagcaccgaaagcagacgacgaagacaaacccacagaattgttgcagaaaccaagggaatacatcgttaaattttccttcccagatcctcctcctctccaaccacctattcttggtctttacaacgtaacttttgcgtatcccggccaaaaaccactcttcattaattgtgatttcggtattgaccttagttctcgtgttgctatcgtaggtcctaatggagttggtaaatctacgtttttgaaacttcttaccggtgatttggagccaacaaaaggtgaagtcaaaagaaatcaccggcttcgaattggaaggtttgaccaacacagtggagaacatttaacagctgaagagacccctagtgaatatttgatgcggctatttgatttgcagtacgaaaaggcgcgcaaagctctaggaacgtttggtctggcgtcacatgctcacacaatcaaaatgaaagacctttcaggagggcaaaaagcacgagtagctatggccgaactgtgtctaatggctccagatgttataattttggatgaaccaacgaacaatttagatattgagtccatcgatgctctggcagaagcaattaacgagtataatggaggagttattatcgtttctcacgacgaacgtttgatccgagaaacagaatgttctctatgggtcattgaggatcagacgatcaatgaagtcgatggagacttcgatgactacaggaaggagctgttggacagtttgggtgaagtcatcaacaatcctagtatcattgccaacgcagctgttgaacagtaaatttaatccagtcatgaggttcaaaagtattttttccttgaaaacttttaagaaatgtctttgattgaaacctcagaatgatcttgtgtcaaccctaaaagtaaggaaagcaattatcaatacctatccctactgcctccctctctcaaaaaaatggtagatgataataagtaatgttgaaaaatcccaagttttaaagaatttttcaatgttttcttaccttttttacctcattgtgtaacaatgaattcatttcaataattttcggcatatctctcctagactggtattttcttaatctccctgctgaaaatatcagtgagtgtttggtttttcctcttaagatgtacaactgtaattacctaccagaaactcaatcctcaccattgttggtcatttaaagcacagaataagtcttttacttcaagcagttctgctacttttttttgttaattttttttttttttttttttttttttttttttttttttttataatcattagccgtactacttttcagctctctcaatcctattaagagttataactctttgctcctctgtttttagcttagaattcgtaattcgtcctgtaattattataatgagtcaattttttcatcttatgacttttttttgtgtaacattctttgttacagaatatatttcactgtcaaataaaatgagattagtctaatgggttaatctattgaataggaaatttattttatctgattctcaattctcatagaaaactgaaaaggatgacgtagagtttcaaaattgcaactctttcaaagtctggaattctaatgcttatcaccatgtatcaacgatataccaatgtattacagacttcccgctgcgagaaaaatttttaaaaagactggagtgttactgtcaaaacgaagttaggagctctttaggtcaattttatgtttaatttcttgtagataatttaatttaaaatgtattactgtattcatagttctatttctttttaagtgagaatttgcacagtatattttgtcatactcctaaagttttcaacattgatgtcagtattttttactttctcgcttctctagcgggtagaggaagtatttaatttaattgaacaaataagtttcaaatttcaaagttccgtcaaaatatgaaccagagctaagtaagagtttgcttattttagctcagatattacatattattataattttatttctgaattaagtgtttaatttaagaccgttttcttgttcatgctcagtggatttgtccatccgttcttaaataattagaaaatgagggaggacagtcacagaaattttctacagacagaatacttaggttgaattgattgcagcaagcaaagaaatgttactttcgaagtacaaacgttactagcaatcatttttccagtcatgaggaggctttaggtaaaattaagtaaaatcgatgatgaaaccagaaaataagtatccggattgcggtgtttcaacatttctgtttcagctttactttttcagcataaaactgtaatatttttgcatcaaatgaattattcatctcaaagattattattctcatgaattattctttgaatgctgaaagaaaatagttttaatttatgaatataaaattattattttgtctgaattaaaactgattttgccagaagttctcaacatcatcaatgaagattcaagcttctcgagattcactttcaaattatgacaaaaccgagtcaactaagtgccttcttttgtgccaagcatcattatttaaaattattttactacggatacgctctttgagtgacaggatggtagattattactggatccacactaagcttctgataaatcaatgctctgattctccctcagaatattaatgcaatagtttgtacggaatgaagtgaactataagggtcatcaataccactaccgctagccaggtaaatagcaatttttcaaactaaaaattagcattcccatcggcgcttttccagactcaaatcaagacacccagcgtcatatatcctctgctgaggccatggaatgtagttgatttttgcacacaacttaaatcttttttgcaagaaaaaaaataaaaactttgagaaggatcgttcaacagtacatttttaggaatgaatctacaaggagttgaccccaaaaaaacaaaatcatcttaacaaggaaaaacatcagatttgtaattttacaacgtttatcgcagagttttcaatatatatttttttaaattcatgcttatcaaagaggagactgactgtcggaaactaaatttatcattctatatggtcattctgacgaggaaaattcttctcctctcagtacggaacctttttgagacttgttcacttgcaactgtggctctcaatggtgattttctgttaatctgcaatggcgtatgcttctgtaaactgtaaatcttctcttgaagtgttgaatgtttctgaaattactgtaaaacttgctgatacttatctaatatgtaggggaaaaatgtcttttggcgtagaatagcttaggaaagcttccacatccaagactaatactgccgtgctaaggaagaacgccgtatgaacattcgagagttgccaaatttccttccacaaaatgatcatttttaaggaaagttatgaatattttttctttaaattttcaaaatctttaggttaaattgtgaactaaattatctgaaaaattcggaggaaaacattgataaatctatcagtaaatttgcgttttatggaaggaaatttggcaacgcctgaaggttcatacggcgtttttccttagcatggcagaatacctttagattggagcaatatacattatacgtacctatgtaaacgttcctcataagctccaaaataaagctgttgtttttagaatcaaagcttggtctcaggcactactgattttggtaaaaaaaaaaaaaaactattcttttttttgttagagcaattgtgttttcctcacaagcaacgttataatagtaccaggggtcttagaaccagtgtaaggagaattgttttggttattgtcatcatcatgaggttaccgaaacaggaactttctcttcttgataatcatcttaaggctgtgttcgaacacttatttttgctatcttgcttgtttcaatcaacatttcagatcatgatgaaactgaattggaatcaaacattgagttacgttccgtcttactctgtaaaataaaaattggatagatagttattttttgttttgtaagaataacctgttcatactgtaaaaataaaattttgttatatttattta

SEQ ID NO: 53 - RNA, 1626 nt, Bemisia tabaci
  source 1..1626: mol_type = mRNA
mrnagttttgattgcctgttccatctgctgttccaggacgtagaaatgtaattcgttgtcgttggattttaatttcagctagccggttcagttaaacgtatgaaatggcctcagtattattgaacgatgctgagaaaactttcattcttcatggtgttgaggtggatttacgatgtgatgggcgcagaagaggtgattatcgaccaatggaattagagactgatgtcgtcagcactgccagtggctctgcacgtttgcgtctagcgaacactgatattcttgttggtgtcaaaacagagattgatgttccgtatccagagaatcccgaggaaggaaaactcgagttttttgttgactgctctgccaatgcaactccagcattcgaaggtcgtggtggtgaagatttagcaaatgaaatcagcagtagattgagccgtgcataccagtctttacctcttgctcctctgtgtatcgtaccaaaacaagcgtgctggaaactctacgttgacatccttattttagagtgtggtggcaatttttacgatgctatctccttggcggtcaaagcagcactattcaacactcgtgtgccgcaggtcaccggttcatttttagatggaggtagtgttgatctagaagtttccgatgatccattccaatgttggaggcttgatataacaaaagcacctgtccttgtgactcttagtaagattggagacaattgtgttgtggatccaactgcagaagaggaaacatgcagtgtggcaagcatcgttgttgccgttttggattcaggctctctcactgcagtcattaaaataggagaaggcagtgttcatgaacaaacactaattgagactatcaaaactgctcagaaaatcggcgttgaactgaactcaagtctgatgacagcattaaatcaagaagaaagtctagggccaaaaagacagagattcgggtttttaaaatgatttaaaactccttcatttaaaataaataaaggtaatttagtcattatctgaatcatctgaaggatttacctcacctacaatgccatgtcataggaggcagcagaaacttcattccagcttgacctgtgtttagcacttattttgatacttttcaagactcacactgaattgtatttattgctgtctcctgtaatgaggcagcacaatagccatttacaatactggctttgattgtttttttcaaaacccagactcatttttcactttgaaggataatatttttttaaaatattgatataccatagatttcacttccttgctcttgtacctgatgcacgtcaagcgatcagtgtaatttatatttattgctgattgataagaccaaatccaaaaaaaaaaacatgatcaacattttaatagcttgaatcacgttttaaagggcactgtacacctttgttattgaacagagaaacttggcttttagatgcagcttttcattttgtgccattaagttagattcagtcgtcaaaattatgtcaacctttgtgcaattgacacattaaagtttttatattctcatcatcgccttaatttttcatgttattaggtgtaacagattgagtaatacgatggataaaatatgttgagctgagga

SEQ ID NO: 54 - RNA, 6943 nt, Bemisia tabaci
  source 1..6943: mol_type = mRNA
mrnacacctcccaactgcataaccttgtaaggtgataagtttcttttgcacagatgttcattggagaagatatcttaccgctaaaatttgctcccagctaagtgcatcgtcagttgctgtacgcagaatttgtgaattcagttctaacaattttgaacatcaccagttagcctcagtcccagtgtccattactgatgaagaatgattgagctagtatagtcaaagctttgctcagtgaaaatggaaactgatacatcttggacaaaaggagattcatcagtcagtctaattcgtaaacctgcttacctgtcttacatacagtcccttttatatttgtgccgttttggagcacgggtcttccatcgtcagctcctcacatgagcatcatggaaatggctaatacaagctcccattgggatgacaccctctcgaatatgtcatcatgctcttcgtcactggaggaatcgacaacctcctcaacatatacgtcgacctcagacgaaggcgaggactatggtgtcaaaatggaagagtgcgatttggaaggagtccgtcttcttcttccacaggagctgtgcgaagacccagcaatattcaaggagatgtttaatgctgggttgtggaagtcgttaagtgaagaaaacaagaggcatttattgaactttttcccatcgttcccgcaaaatgacatgcaagaaaaatcaaaaaccctgcaaaaactcttaagcggtgaagccttccagtttggtgtcaacccgttaacggacttccatgaaaaactaagggccgggaatttcagtcctgatatcgccagagttcgagctttgctcaaacgggcacagtacaaggactacaaacaaagtcagagacgctactactttcaactaatgaaaaatattttactgtctcgacatcggttactctctgcggcagccagtttgcccccaggtgccccccttccacggttgcagccggtcggcccagcctcctcctcttcaacttcctctcctatataccaaaaggtccgccacaggtatttcaaggagctggaatcaattaaacaagaaataggtgaatctagtcaaagttcagaagacgaaagttttccagagggacctcctccgaagttgaataagaagcaaaaacggcaattactccaacttgaacaatgtcttagtccagacatgaaccctgtgacatcaacactggtgcctaaatcaacatcttttgacctcattcgttccgtcaactcctcttgtaatccctttgaggtcactgaagattcttaccgagaaatgcttcttgctcacaaacggaagaaaatgaatggcgttgtcaagacaaaagtacctaatcgttcccagttaaagcggccaagtagtatagacctccatgccaaaggcggcgttgttgtaaataaaaaacaaaacgttagaagtagtgaacctaggcctcagaagagggcacacaaatcaaagtcatcactgatgcctgtaaatccaaaaattagctcattagatattgaaaattgtgaatcggaaggggatgaaaatgctcttccctctagtacgcttttagatattgaaggtgattcttcgtcttcatcttatctacctgggatgcccaagtccaaaagcaaaacaaagagttttaccgttgagtcgacctcaagggatactggtggcagagttaccgaatcaaatattcagcaaagttcaagattacctgttggtccaccaccgatgtatcccaatcttggaagtatcaacatgatggacttgcctgttgacatcgatgagagtagtcaaatcgatgttgaagatatcaaacctcttcctgagcttctgaagaagactcacccgtgttacttctccttaattcgtgatatattttgctcaacgtgggatcatagactcgggttgttacctctacgagaacaacttcagcaatggtcagaaagttccacatctctcctgaacagttggtattcactggccaaatggacagagttgctgccctcagccctggctttcttaactggggaatcaactgattgtttaccggatgagtttgtgccatacgtggaatacaaacctgcgtgtgatgcctaccagtggatcggtgccggtcgtgactccgatgctcgtcttctatccttgtatcacttttggatggaaaggcgggagaaatcctcggcacaatcaaataacctggacgtggaaaatgtcaaagaagtgaaaagagagccctcgcccctacctcctcccgcacgatgtcaaacatcatgggttgtcacaccagccactcctgaagagcgggaatcctttagagagcaggaaagaaggcgctttgaacaacctcaccgagcattcacttacaggatgcatgggtatgaggccattgtcggtcctgtgagggggatgtacaatgccgctgcaggtggtaaatcacccagagggcattcgctattagttcatgaacggccgaattatgttaccattttaactttagttcgtgatgctgtggccaggcttcctaatggccagggaacacgggcagatatctgcacactgttaagggattcacagtacttgaacacgcaagtcaaagatactgatgttcagaatgttgtgagtggtgctttggacaggctccatgcggagtccgactcaagtgttaagtacgattctacgaggaaaaactggatttatctacatcgagctcgatcagaagcagactttgaattggttcacaaagaaatgcaaggcatggccaaaacaaagggtccaaagaaaatgcaaagggtgaaaaaagattcagcagcgaaagaagcaggagaaggcagttcaaccacaaccgttttgagttctaaaaaagcggactcagtcgccgatattccttcaactcctgcgtcaccaagtatgacaaaaccgaagactatcaaaactttagtgccaaatcaaaatgcgattgctgccgctgctgctgctgctgcgtcagtcgccacagcagagccaacagtgccaagcatacctgcacagtcgcggccagttacggatcctaaaccagtccttgtgaagagaagttctgtgccaaagaaaccaaagctctcgcaaggagccatcatgtcaaaactgctcaaggaaaaatccttaaatcctgtgcctaagccactcagtaaagctaagctcaaagctctggaagcagcagctaaaatggaaacgaaaaatttcaatgctgatgataaatctgtggtcactgaagatgtgaaaccagtgaaaaaagtcaaaagcacgcctaataaaccaaactcaacaccgacttctgattcgatgacaattgttgcgaacattgtgaataagaagcaagagggtagtgggaacactgtattaaaagtaacaaaccaaggtgctggaggtcgtacggtggtgggtcagacgtatgtaaccccacagcagttgatgctcattaaacaagcgcatctactaaataaacaacaacagcaagcaacgagtgatgctcagaaacagccgcaaatgattgtcatcaatcaacaacaaaaggtgctagcagatcagttgtcgctgaagcatcaaaaacagctacagcaattgttattgaagcagcaacagcagcagaaacagctgcaacaacaacagcaacaacaacagcaacagttacagcaacagcaacaagaacagccgcaaattcaacaacagcagcagcagcagcagcaagggcaacagcagccgcatcaagaacaacagcaaaccaagcaaccgcaacaagcaaaacaacaaccaaaacagcaggttcagcaacaactgaaactgcaacaacagcaacaacaaccaaaacagcagaaacaaccacagctacaggtagtccaacaggctcagcagccggaaactcaggaggcatctgaggcaaagccagcacctgaaccaaaaccacaaacgcaaacacagcaaatcaacttatcgtcactacagccagctcagatacagcagttactgctagcaaagcagcagttattggagcaacaacagaagcagggaattatcacaacagctggtggcaaacaaatgatagtcctgaagcaagggcaacagctaatcacagctgatggcaagacaatccaacagcagcagccaatgcagcaaatgataatcgtgaaaggttcatcaccggataaaacgcaaacaacaacaacaatcagtcagcagcaactgcagcaattactcctcaaacaacaacagcagcagcagcaacaacagcaacagcagagcgagggtaaaacatcaataacaaccactgtcagccaggcgcagttgcagcaacttctagcaaagcagcagttcatggtactcaaacagcaagggaaacaagggcaagggcagataaaattagtcccatcaggcacaacggtgtctggtcaacctcaaattaagctgacgcagacaatatccacagctcagttgcagaaaatgcagcctaggataatctcaacgcagaaacctctgacacctgtgtccacgactgtccaagccataagctcaacaagcagtcctctagcaagtggtacgaacatcatcaaaccagttcagtctgtcatgacgaaggttgtctccaacgctcaaacagaatcggtcgtaacagtgggaaatctcctggcgaaccaaaagcagcagactgtgatatcttccgatggaagtatacgtgtagcagacaaaccaagtataggttctcatcagtatacagttgtgtcgatgggagagggtcagtcaagggtcattcaatcaactcagttggttcaggcaagtacaaatctgacaaatgcacggaacattgcgacgaaaacagcaaatttgcgggttctgcaaagtccgacaagtatcaaccttgctcagctcgctgggaaacctgtcattctttcccagaaaactcaaggcatccaaggccagaacatggtcatagctagcagtagcgcaaatacaagtggacagcaaactattctgctaccacaaagtattaagcagccaagcggtagtaacacagtgacagttttgcagtccggaggtgtgccacaacaaatattgttgccagcaggttttcaaggaggtaccctaaatatcaaagctcttcaaggtctcaaagtgattcctgtggcccagtctacccaagtacaaaaaggtcaacgccaaatgttcgctcgaataattagtccagacagcacgaccaaaatcatcccggagcagacgaaccttaacaactcccaagttgctgaacagagtgagtgagagatgcctctccatgtttcactctaatttgtaattttgatggatctgcgtatctatggtcagcatgcatggtcaaagaaagtcattagccatcatggccgtatcctagtactgctttctcaattagctccaaaaggatgctgttttcactctattttgtggtgtagattctaatcaagcttgtgttgcatactgaaatgctctgcacaagtcaaacatcctctatcagcaaatttgagtattttctttttttttttttttttttgcttcttgcgttaacttggttacaatataaataatcaccttttttgtacttaaattaggtgatcatgccgtagtataacacttgaaatgccttgtacattctcagttcatacatattaatcagagtgatttatattgttgcctagttgactctgtccactaaactgttttaccctagcaaggatcatttaagatcagtattctcttagagtttgtgcggttaaaattatgagccgatactctgaaaggggaaatgtacttagttacaacaggctgcttgctatatttggaatactagatcgttttgagactttttattataattgaaaaatgttttggcagagaaaaagcttttctctaatacaacattattaataattcaagcatccaacatttgcatgtgtgccccttttctctcatgctgtaaatgcgggctgctaaatataagctacacagattgagagtttacttatttgagatttttgcagaagagacatctcttaagtatcctcaaaatatgtgtttccaaagtcagaagtttactttctaggcatctaggttgtgccataaatagatcaacaaaacttgacgaatttttagaaacgaaaaggaacttaaatatttttgattgtgaaatctcttttagggattcaaaagaatgttttctttgcatcatttatagcaaaaatttaaaaaatttctgaccaattatacacgcctcttgttaaggctttatcagtaatttttttctttttgaactgtatcaacatttttttcacatatcatcagaggaactgaaaaactgtgaccttcctagttatttctgtcttattttatttaacgtaaaagaaaccttattgtccttaattgttttaaacttaatgtttaaattctgcattatttttcttttcccagtttcttttagaaatgaaataagagaggaaatttggaaacatagcaatttaagcacttcgtttttttgtctcatcattgatgtgtattctcttctcaggtaactagcaggaaaaaatgaaatacgcaacgaatactgaggggcgttacataatttcaacagatattagatagcaccactgccaaatcctccaaaatatcagttgctttccatgctacacagtggcatattcgtgtaaacattgtaatataactctgactcaggggtaagttttaataaatgaaaggtggcaatattgtaacagagaacatgtacctaatttgccattttagttgtgctggtgaattgtattcactttctgacctctcattactgctcctaaaagaaatggtctgtgaccataagatgaagtagaaatgcaaggacagttgaaatagtataactatttgtttgaactatgggaaaa

SEQ ID NO: 55 - RNA, 3050 nt, Bemisia tabaci
  source 1..3050: mol_type = mRNA
mrnatgttgttcacttcactcacattgctcacaaacatgaggcaagctagtagataaaagcaatttttgtattcattaattgttcatctcgctttgaaatctttggatagttggctcctttttttgcactaaggacgtgaagtaaagaaatcagaacgccacaccatgagtgatacgttgacccaaagggaactaggcctattgatcatcagattctctctgatcacagttgtgtcctttgtcgcattcaaatggatgttacacaaaatagatccaacaaagaagcagaaggaggaagccaagaagaaggctcttgcaaatctcaaacggctgggtatgaaaacagatactgacttaaatgatcatgaaatgatggtagctgccaatttggttggacctaatgacattcctgtttcttgggatgatgttgctggtttagataatatcattgaagaactaaaatatagtgttatttatcctatcaaattaatgagagcaagaccggaatctcgactcactcgacctccaaaaggagttcttttgcatgggcctcctggttgtggaaaaactttgttagcaaaagcaacggctcgtgaagctggcacaaactttattaacctggaagtttcccttctgactgacaagtggtatggagaaagtcaaaaaattgcagcagcagtatttactcttgcaacaaaactacagccttgtatcatattcattgatgaaatcgattcgtttctgaggagcagaacgacccaagatcatgaggcaactgcaatgatgaaggctcagttcatgtcattctgggatggtctactcacggatcccaactgcactgtaattgtaatgggtgccacgaaccgagcttcggatattgatgctgcaattttacgccgtatgccaactgtatttttcattgattacccttcaacaacacaaaggcagaaagtactaggccttacattgaaaggcgagcaactagcttctgacgttagtttagatgtattggcaacaaaaactgatggtttttcgtgctcagatttgtatgaattgtgccgtaaagcagtgagcactaggaatcagaaagctttccaatcttatgtcaagagccaagaaaacggtggcatttttgattcgaggaatcaaagcaaagaagactcttctaaagacttatcctctagtcagtcgtcaaaatcaccaagtagtaaaagtgaacgtccttccggagacgcagaatttgtcaacataagaataagtccactttgtatggaagattttgagaagtcattggttaaaatgaaagctgcaagaagtatattccagtcttaagaaaaaggttacttaaccaagaagcattttaggtttgtgcagagtcaaagtccaaaagtgcagttcattttagtgtttttgaaatgaaaggtcagcctttgatatgatctactaccatggaatggtaaagaggttataacagcgcttatttaggacatgtagatatctatattcttcgagcacaaggaggaccccatttctgcacttgtgaaattcgaacaaatttttttgtaattgtggcagccgctatggaatcccttgacggtttttgacagttattagttcctgttaggcttttttgggtatttgttgttcttttgcgaaaaaaaaggacacctttggatagcatcaagcaaaaattatctatctatgaggagttgtttaaagaaagaatttctctgttttctgagtggcaaggagacttgtgtatatcaaagaaaacacccacaattgatagaaatagacaatgatactatttgaggctagtgtatgtagatgaagcttcacatcacttgaagtaaacttcggaagatggtggaaagtggtgaaatgcttaaacttgccctacggcagatcatagtttttattttctggaaaaagaaaaaaatcgcttgtagacctattttgtgccaagtgccacctataaaaagtgaattcaaccagagaaatgtaacttcaggcattcaaaatctcatgtcaagaagtttatttaggtcttgagtggtttcaaccagcctcgacttaacgccttattgtcgatatttcttttaactctttgaaagtctagtgctcatattccaatctaacatacatctggactaattgcaacttttttcaaaactctttgtagatagatcatgattgttcgatgatttgaatttaagaatttgtgtgtagcaagtatgaatctcctttattttttttcaatctgatgaattttctttaccactataatcaatgaattgatgactttcagccattacctttcttaagattacttcaagtcaaggccaggaggttcatttttggaaatcctggagttttttttttttttttttttcatttctttaatttttttttactgaataaactctgcttaattttgaagtaacattgctctgtttggtgtggtgtcctctgcagacgtttcacacagatgtttgaccaacgagaagtgctggtttgggttccgcaggaagttgatgagagcttcatcctgttggttgggtggagatgctgtagattggttgggttgacttgaccactcctcctcaatttggtttactagggtaggacatttggggggctgtatgatcaactttctttcaccagaaacatcgccaattcctggcaggacatgatgctggattgtgctttctaggacagcggaaacactgttgcttgggttgtggagactgcagcttagatttatcatttgactgtcattcagaccaatgattaattggtctcgaagagctctatctcgatgagtatcaaagtcacactttagagatatatttttcaattcagcgatgaaatcaggaagcttttcaccttgaatctgtttacatgagtgaaatttaaatgtgtcagcaatgtcggactgtaatgttctttgagatttataacacaatcactgaaggacgcgtctttaactgatttaggtgctagacggttttttaatatttgaaactgttctggagttaatggaccactga

SEQ ID NO: 56 - RNA, 1001 nt, Bemisia tabaci
  source 1..1001: mol_type = mRNA
mrnaatgcgcaacaagagatgcaggttgctgtgcacggagtccttcaaaccgcctgaaatcctcaagcaacaactggggaatgacacccacccaggagcgcaaattccattttataatcgaatggcaaagataaaattcgggactaatgctcacactctggacatgtacatccgaaatatgacggatattttccccgcacgatcgtacaattgggcgagggacaaccacgacaacccgaggatgacctcgcaattctacgaagagagtaaagactcgtggaacatgttgcttcttctcctgccaggagtacctactatttattatggcgatgagctggcaatgctggactcgaatgtacgtcaggatcaggagcaagatccccagaagaggggtagcttccgagataagccgcgggatgggtgcagggctcccatgctctgggatgacagcaaaaatgcaggattcacaaccgccaagaaaccttggctgccggtccacccgaactactatcatacgaacgtggaggcccagaggcgggatcctgatagccacctcaacattttcaaacgcctcgttgatctgagaggaacgcccgtctatttacacggcgacttacaaacttttgtacccaaggagtgggtttacatgttcaccagatcaaccaaggcggaaacgattgcagtgctaatgaatttggggtcggaaacggaggagatctgcgctcggcattctgccacgcatttaccggaaactatgttcgtccatacaagcagtgtcaattctcgcctcaaaattggggacaaagttaaaacaaccgacgttgatgaaacaaaatgcatctccatgagaccgcaatccgggctagttctgagcacaacttctagtgacggcgttaaaatatcgtgttcagccattgttctcatcttagttgcctccttcaaagtcattttataggtctgaatttaattcttaagtaaataaactttaagtgctaaaatga

SEQ ID NO: 57 - RNA, 11747 nt, Bemisia tabaci
  source 1..11747: mol_type = mRNA
mrnactgtagttttacgcccgtcttcttaggtgctttttttccttttaaaaaaccaaattataaaggaacttctatcggcgaaaaccaggaatggcccgtcggagctaggagggctttggtccactcgtcgccaaaccagccaaacggatgattttaagtagatttgactgatttcaagtcaagaatatcacccaaaacactggcaatatgaggagatgaacatggatcttatttgaggtagtaaaacttgaaagctggctgtactcaaccgattgcagttggaaggattatgatgggcgggttgatgttagcagaggtatggctcgtgacatcgatccttgtcgtcctttcagcaggcaagtcgcttttgcgccacgctcgccaccaactggatcctcccgcatccaacatggacttcgatcacctccctctcagagcctcgcctgagactgaccaactccgcaacccaagacatgggtttggatttcgagacgggatcagcgacgaagggctcaattttcgacactcggaacacgaaggagagaggagcaagtacaaaggagctgaggcggaggaagagatgatggcggacgaaggggacaatgatccgctcgtggttcagacgacgaaaggcaaagttcgaggcaccacgctcaccgcagcaacaggcaaacaggtcgatgcctggctcggcataccttacgcacaaaaaccaatcggggcactgcggttccggcacccgcggccgatcgacaagtgggaggggatcctgaacgcgaccaagatgcccaactcgtgcacgcagatcgtggatacggtcttcggcgacttcgccggctcggccatgtggaacccgaacacgcccatgtccgaggactgcctctacatcaacgtcatcaccccgaagccccggccccgcaacgccgccgtcatggtctggatcttcggcggcggcttctacaccgggacggccaccctcgacatctacgactacaagatcctcgcctccgaggagaacgtcatcctcgtctccatgcagtaccgcatcacctgcctcggcttcctctacttcgacacccaggacgtccccggcaacgcggggctcttcgaccagttgatggccctccagtggatcaggaacaatatccacgccttcggcgggaacccgcacaatatcacgctcttcggcgagtcggctggggcggtgtccgtctccatgcacctcctctcgccgctgagtaggaacttgttcagccaggcgatcatggagtccgggtcggcgacggcgccttgggccatcatctcccgccaggagtccatcatccgcggtctccgcctcgccgaggctgtcggctgccctcacacgcgcgcgcagatccctgaggctatcgagtgcctccgaaaggtcaacgcgagcgtgctcgtggagaacgagagcgggaccctagggatctgcgacttcccgttcgtgccggtcgtggacggctccttcctggacgagatgccgtccaagtccctggcgacgaagaacttcaagaagaccaacatcctcatggggagcaacacggaggaggggaactactggatcatgtactacctgacggacctcttccggaaggaggagaacatccacgtctcccgcgaccagttcatccaggcggtgtccgagctcaacccgtacaacttcatcgtgcggcgcgccatcatcttcgagtacacggactggctgaacccggacgacccggtgaagaaccgcgacgcgctggacaagatcgtcggcgacttccacttcacgtgcaacgtcaacgagttcgcgtaccggtacgcggagacgggcaacaccgtgtacatgtactacttcaagcacaggtccacgagcagtccgtggcccacctggtcgggcgccctccacggcgacgagatcaactacatcttcggcgagccgctcaacccgaccaagaagtaccagccggccgaggtggagctcgccaagcggatgatgcgctactgggccaacttcgccaaaactggtaacccaagtttatcatcagacggaagttgggcatccgtgtactggcctcaacacacaacgtacggtcgggagttcttaacgttagacataaactccactgccatcggccaaggccctcgtttgcggcagtgcgccttttggaaaaaatacctgccccagctcatctccaccactagttaccttgtccctgccaactcaagcaactgcaccagtgcagcgccaagttctctccttcaacatgggttcaataaattatccagtcattcgtcaccgttcatcctcctcctcgctgtctttcagtttctgctgctgcttctgtcgaacagtgccattttgtaaacaacgcaaccttttcctctgcaacggcttcatgtaatctggaaggaatttctcattatcgaaatcaagttttgccctgactcttgtttcttccccagctgaaaagcggaaaatagttccttcgaatagaataatctactgtgctttatgaatatgttttcaatgacttgattttcgcactattcctcgattactttgtccccatgatgaaacccagcatccattgagatcggatttctcgacactagtcaaatttgtgttattatttgaactgatttaggtacttatttttttatatttatagggtagatttaaaatagaaggggcagattattgtctctttttactacttgttttacaaacacattttttttataaatatgtgactattcctctctttttttgtgaagaaaaagaagttccacaggttatttgacagtcttgaattctacattcctgaattttgtgttcgttttctttgttatctatacttatctactcatcgctcagtttcgcattcgcttttcatccattgaacttatttcattttgttctatcaagttttgttgtatgaactcttgataagaggagtcgagaatggtctcacgaatgtcaatccttcttgcttgtgtctttcctgttgagttggttactttttaagctttgagaatttgataagaaaatgacctaagacagaaagtcaaagcaacttgtgattaatttcactcatgtgtagtttccgtatctgaaatttatgatgatatgacgtctaaatggttacggggtcattttgaatatagtttagtaatgcgactatcggcgtaagtgttggcttgaagtacaactcggtcgtgtttcatggtaatatcttgcacaaaatcaaaaattttgatataaaatatgatacctatcaatccaaacatagtgtcacgtcaatcatttctggaaacctcgctttatgggggacaaaaacaatgactggatgacctaattcttgatgtacgtccaaatcgggattattctaccctgttctcatcggtctgtgatgaacatcgatgacaaaaataaggaaatgcgtatctcttttgcaactttcagagatctgttaccttcttgttttttccgaaaagaaacaatccggagaacctccttttgaatttttttcggaaatgtttgtttgattaaagacgactcacagtaaattttgcgaaaaatgctttgttggttttctttaaggctgggcgaagatttatatcccccaatcggaggcttacgcatttttttaatatagccatcgatatgagagctgcactcccgttttttgcgaatcttcagcactatgtagaaaattttgattgtctatatcgatcgataatttctgcattttaggatatttcctaataaattccaagcaccatgtcacgctgtagaacatcaggcatttgcaccaaaaaaaccgtcatactactttacaacgtatgtatcaataacgagacctaaattcggtgcagtggcgtggcgtgctttgcgttctatcgattgatctgccatttgagtctataaaaaaggatcgataaacagggttgatgaacgaaaaccttaataatcgattctttaccatagattcaaaagggaaaatatcgatgatcaagtgcacgttcatgaatgatgacgtcttccattctcctcttctaagacgataatcctcgctaaaattaaatgtaaaaacaatactttcgtgcggcgagtttatcattatttgcttctcctttctcagatataacaatcagaacacgatcgttcgacacgtacactaacgtttggtctttttataatttgaaggtagttaggtaaataaaaatgcagcgaatcaaggaagtggcatgttttattcggtgtcatcctgacactgtattcctgaatgcaaaaatgatggaaaccatctgtttagcgttcattcgaaacattcattactgcggggacactttttatcgatcgtacaattcatttttaggctgttacgattctttgaagtcggtatgactggtttctctccattcaaaaccacatccattcaaagaagcgaaacatttcgttgccactttgcgagaatcgcccttgaaagttggcaactatattttccctccatttaaatgtaagtaaaacaatcgattcttggtgggacagcttttctcgcctataatcgatacttttaatagatttaaatagaggaaaaacaccgttgccaacttgcaaaatcgccaccgtactgcactcggttatgaggggaattttgtctgatagttattattcatgctcagaatagtttttaatttcttccaatgtacgaaaaagccaactactcgcacaatactcattgaatagtaaatcaggaggaaatcgcacaattttaagtaaagtgtacagaggaaattttctattttacgttaaaaattaaacatgcattagacattaaacagtatccgagtagaggacaaaataatattatgtatttaatgttcagaggaagcgtggaaaatttgatatgctggtgtggttaacagcgattgtaaacaactgaggcccttgagcaactgaatggcgtggcgtgaattgcgatacatcgatgtacctgtcatttaaacctgtggaaaaggatcgataaaaagggtgtttgcaacgaacatcttaataatcgatcttttaccatagcttcaaatggagaaataacgataatcgatctttcacgtctcgccactgactgaatatctctcaatcacgcccaattttgagggggtatttgatcagttaaacctcaccttcctgcataccaaattgaaaagttgccaagatgtattcatgtagatcgtattcgatagtggttcgatgtatcgtttggttccaaacagtagaacataacctcaaacaaaaattataagatctcatttggaaatgctgaaaataagaaaattcctaacaatttcacttttcattgccatttgggaccagaaagaagctatgtttacttgctgaaccaatcgatatcgatacaatctcacctgtttgatgtaccaaatacaatgtataggtcagtcattcccagaaccaaaattagaatcttctgcgcatgacgtcactgcgctggcgcgaaagctagagagctgggaatcaatgcttttctcatgagagaaggctaattttcattgatgaatcatttaaatatctttcttttaaaccttttaaagctttttgagagtcgaaaagaacgtccagacattagctttcagggttttgattcggccgaatttacgtttttataatttttaatgatttttgaagttagcgctgtacgagccattttgtggtatgaatctggcctgtaaaaatggctgatgcagagtcaactgtaaaaatgaaaaaaataacaaattcggcaaaatcgaaaccctgaatgctaatgtctaaacgttcctttcgacactcaaaaagtttcaaaggatttaaaagtaagcaattcaaatgattcgttaatacaaatcagtattctccaatgagaaaggcattgtttccaacattcctggtttttacggcagctatactagtggcgtggcgtgaattgcgatatatcgattgtaatgccatttaaacttatggtaaagaatcgattattagggtgttcgctgcgaacactgtgtttatcgatccttttccataggtttaaatggcataaaaatcaatatatcgcaattcatgccacgccactgagctatacctactgacgtcacgatccaatggacaaggacaaccccgagcgcaatgacagacctatatgtatagatcttgagatttgcatcaatgaagatgacccgctcttgcaggaaaccaacactgtacgactgtagccataatttttgggtcggactcgtgattttgtccacagacattttaattttccatgacctaggacggtccccttatggatgtcacgtgcttcgggaaaattctgtttttgattttcatcttttgtacagttttgatgttacccttcgttgtaagaaagtaagaatttctgttattggtggttattcatacttgtgtctgattagttatttgtttgtacagtattatagataaatttttctcgccaactctaaaaatttcctagggaatgttcattagatgctgctctctatgcctcacttgtatttaatcagaacaatgcggtctgtttccttgtatttactaagctaaacacctgatcatgcttcattgaattaggttagatagatttcaaaattatttctggttcttttccttttttctattatgttttgtcaatcagctcaaaagataaactacaaacttacaataggtttttcatgcggtggctctagaatattaaatgtttgtaacgcatttaattcaaatcgtttggatttattttctcagtaattttatctggattcacttttggttcatctatccgtctctgatttcaccctgatttgaaagcagataaatataccagatttaattcatcgtccacctcaccatgcaaataattgaattcttcgactattcatcgattatgacgattcttcgatcttacctcatctaagagaggaaaaaatcaaatggaccttaaaataaagtgcggccctcctattaacttggaagccttatattatcaatttaacattttttaaagctctcatattcttccgtacataagtctagatggccctctgtgcgcatgcatcagttacattcaggaacctacaatcctgatcggtaccatcatcatctttcaccttaaattctcaaagaaattcatccataattgataatgcttgcatgattgtatccaaaaatcattataattttcattccgtgcctatagcgttaatataaaacgtattgatacctacgtacggataagtcagaattttgataatcatggaaaaattccccgtttaatgcaggaatatggcatgagcatgcagtctggagagtggtctgaagaaaattgccgctacatttcaaactttaatttagctcaaagggctctttttctgaaagcgaagtaacaatctatttagtgttagttcaattgacctgcatgtaattatgagcaggtacttgatttatcataggtagcctactttcgagatggataaagccaaaaagtgtgatcatatgattttggaactaaatactgcgaagtattactaagtctcacatagactccctactcaacagagatttgtgatttttgctagttattagccgtagagttagtcttatcgtaacataaatatttgagctgaaccaaatttccgtaatgttaagtataataaaatggacccgcataatccgcagaagtgcttggcaaagcaagcacagtcttgatgttctatccctatttacttttctcttattcttcttcttattatatagttgtgttgatacttaaaaaaaacgtctaggtaaattttgttatcgttcgtagttttgatcatagatgggctgtgctagattatattgttcagagtttcttgggcatggacgaagaactcaatccatgggagtaggtctgtagacttcagatccagacaatgctattcatttatgcatactgtatagtttgacagtgttttgcggaggaagttgaaacatttcacgtcgtgacttgtgaggggttggtgagagtgcacctgagttgataattatcagtggcgaggcgtgaatgatcgattatcgatttgtccccatttgaagctgtggtgaagaatcgattattaaggtattcgttgcgaacattctgttatcgatccttctccataaattgaaacggcagatcaatcgatgtatcgcaaagcacgccacgccactgataactatttccgcattattcacatagcgtgagctttgaaggaacatcccttggtcacctgcttcttggaggcctcaaactgaactagtaatgtaatcgcacctgaacttataaaaaagtgtatctctttaaattcccctgttccctggaaatttctcttttcaaacttcgaatttcacgcatttctcccccattttttaccgaatatttgagattaatgttccgtaaattcataccattcaaccacagattttttcctttcctagcagcaatggtgtacattttaaggagagattttgtatgattaataaaaaataccatcaaatgagcgatgaagagagaaagtctatatcaacttttcaaaaattaaaaatacatcaataaaattggaaaaatgtagcatttctcgggggcttcagcaagagaattcttaataaaacatggttgtcaacagaaattgaaaatactgatcacttttttacgatttttactaatgaaaaatatctcaccttcatccgaaggaatgatctatttttgtgtgaaatctatttttcaaatgtctgctaataaggcaaacaagggacagtttccttgcgttatttcacatgtctccagtattttactgtttaaaaaaaaaaaaaaaaaaaaaaaaaaaaaaaaaaaaaaacttgcatttaaattaaaatctggcaaaaaattcatcgacaagtcgggcgggttaatatagattccaactgcccgataatcaatttttcagggggtttcattttttgttctcgggaaccattcaggtgcgacagtaaaaatcagtactagtttaccttatcggcacaatagaatcaggttaaggagtaagaaaaacacaacaactccctcagttatagtatcgcgtgcgaaaaaccccgaaccaagttcattataaatattggatgcaacttttcgaactccacggatatccgcgttgcatacgcccggaaatgaaggcgttttgacactctgtggatttcacgctttatccgcggtggtgaggcagtatttattaagaagatcgcagatggcggagagccttccattcttcgtttagatactaaaaagacgaaagtgcgaaaagctacgatacaaatcatgctcgcctaagatatgtatttgtagtatatgaatgaagaattgaaaacgatctatttatttcgatctgtccctactgccgtaattcaacttgcgagccgttgtaagatcatgcgccgtagtaaaattacatgtggttaaactatcatgtatgcatcacatctgtttaagcatacgctctgtatctgaccaagacctccctccttttcatttatcgtttttcgttttctttatacttagggtacagtggcgcggcgtgctttgcgctatatcgattgctatgccatttaaacctatggaaaacgatcgataaacagggtgttcgcagcgaacaccttaataatcgatattttaccataggtttaaacggcataacaatcgatatatcgcaattaacgccacgccactgttagggtaatgtgtagtttgccaacgatccacgtttttaatacggaactttcctccacgttgaggctgataaattctgtccaaaaacgttgtgccagtttttgcggtcaaataactcgggatcaacagcatcaatgccaacctcagtagcgaggcgtgattgatcgactatcgatattttcccatttgaagctacggtacagaatcgattattaatgtgttcgttgcgaacaccctgtttatcgatccttttccataggttaaaatggccgatcagtcgatatatcgccaagcactccacgccactggccaacttggtactcaaatgcggaagactccgaacgtagttacgtattttgaattttcctaggcctcgacataaccaactcgcttttgagcggaggtgcaaaggcgagtataaaaagaacggaacttttggaaaatgctaccaagagataaattgaaagatataacgggatttcaattgagaaataatttcgtaattagtgtatcgggatcattttgtcgtgacggagttggcattgtcagtcttatttgaccgcggaaaatcgcttgtcaattccattaaaaattagccagaatagcttcatctcttgttcttaactctctcaaacctttcgcatagaagaagatagtaacgtaagaactgaaagtaatcgttttctataaaataaagtatcatattcagtctcgaatactttggcttgattaggcacctacccatgttcatcattgtccagtccataacaaattacccagtggcgtggcatgctttacgatgtatcgattgatctgtcatttaagccaatggtaaaggatcgataaacagggtgttcgcaacaaacactttaataatcaattatttaccatagcttcgaatggggagatatcgataattgctcatacacgcctcgccgctggacttatccctggagaagcatcatgaagttcctcccagaattttctacaatcttgctcaaataactgactccaaagatacttatcctggaaaccaaatttttattgatatttggaaatttgaggtgtcctctgtttgtgttttaaaagagtaagtatccctaagataatttgatttatttgtcttccctaaatttatcagaagtctcctaactaaattttttatcattcagccaaatttcacttcacaaaatatatcgtgtccagccaaaatgatgtgtgactcaaatgatttttttagagaatatccattccacctactgttagtaagaatacgtgttttttatgaataaataattccttgaacgcaaaggaaaaaaggaataaaacttgataatcctttaatcggaatgcttagaattttgacgtaacccaagtccagtagcaaagctaaaaaatggatacatccgaaagttagtataaatgaagataaaaaattcggctgattgccatttcttttttcagttctttcgtaaaaaaaagtatcatccctcccctcgtatcgtggattccttcttctattaatttccctcagataaaattcggttgtacatggcaaaataattcttatttttttttcagttcatgaaaaccttattcgcaatttaaaatcaatttaggcccccaagttatcctccaagtcgatataacaaaaatttacaaaacgctttaattctacttagtagatgaaccgtaattataaatcaagtaaatgtgaaagcaggacaccattcatatgataattaaaaataggactaatctagtaaaaaagttaagtgcgtttccaaaattcattggaattatttcacgctgcacgttgcagatgagaggagtatacattaaagaatgtctagtctccttcacgcttcttttttgatttttctctgatatataaataataaaataggaatagcaacttttaagagtaagcctacagaagtgaaccaaaa

SEQ ID NO: 58 - RNA, 3173 nt, Bemisia tabaci
  source 1..3173: mol_type = mRNA
mrnatttgagagcgctgcggtgggtacgcgccggcgccttccagtcagttcgtgacttttcccgcgcaagtgacccggatttcgaaagttccgcgctcggatccgatttgttttcgatcgcttcgtatgattgtccgactcggatcattttccgcctgatttccggttcagtgcggtgtattgtctttttttccccctgttggtttttctgcccaacgattaataaacacagtgagctctgcatcatcgggatgcaggctgagtgagtgatccgtcctctgcgacaaaaacgcgtttcaggactcataaagagtgcggtcaattttaatttcgcgccaaaatggtgaacagtgtggaagacgtttttgacgacgcagagaacgagattggtgattcctcgcccgttaggaataaaatcgacaccaacatcgatgagccgaaatcgaaaccccagatcgaatgcaaagagtgcaaaagttacgtctactgtcagggtcccctcctgtacgactaccagttctcgggcctcttcaatgactcgaagacgttcgtggacaagcggctcctgttcccggaggaggagatcgtgcgcaagtacacggccctgaagaagtcccgcggcggcgagctctcgcgggcggaactggagagcttcctcgcggagaacttcgccgacgggaacgagctgatcccgttcgagccgccggacttcacttcggagccctcggtgctcggctacatccaggacggacagtaccgacgcttcgcggccaagctcaacgaggtctggaagaccctcgcccgcgtcgtcgaccgcgatgtcctcgagaacccgcgcatgcactccctcctctacgtccccaacaccgtcatcatacctggaggtcgtttcaccgaagtatattactgggacacctactggatcgtgaaaggcttgctgctgtgtgacatgttcgatacagcgaaaggtgtgatagacaatatcatatatctagtcaaaaagtacggctacatgctgaacgggagcaggaactactacgagaaccggtcccaaccaccgctgctcatcccgatggtggccgcctactatcagctcaaacaggacgaggcctggcttctcgaaaatctcccggttctggagttggagttccaattttggatgaacaaccgcatgataaacgtgaaaaaggacgggaaaacgtatcgaatggcgcattacagtgtcgaaacgtgcggacccaggccggaatcattcaaggaggatttcaccctggcgtcaaacctgacctctgatgaggagaggacaaacttgtacatagaactgaaaacagcggcggagacaggatgggacttctctcagagatggacaaaaactcctcctggacaaacagaatcattgctgtacctgaaaacccgctccatcattccggtagatctgaacgcattcctacagctcaacgcccactacctgagcaactggttctttatggctggagacatttcgaaaggtgaatactacctgcagatcgcggaagaactgctcacggccatcgatgaggtcatgtggcgtgaagacttgaaatcgtggtttgattgggacaacgaggacggacagagcagagtagacttctacgcatccaacttgactccactctggaccggaagttacaggaaagcaccgcaagaaatgggaaaattcgccgttgagtacctggtgtcacagggaatcatttccgaggacggtatacctagatatctcggaatcccgacaacgcttaagaatttcggacaacaatgggaagcaccaaacatgtggcctccattacagatgatcggaatccaaggcctggacaacacgctgtaccctaaggcgcaacaggttgcataccggctcggagcgaaatacttggagactaactatgttggtttcgttcgcacaggacagatgtttgaaaagtacgatatgaaccaactgggttctattggaggcggaggtgagtacgtgccacaaaccggatttgggtggagcaacggtgcttgcttcgaaattctcagccgctacgggcacaaactcaggagcccccaggagtaccccctcccaaactaactgcgaaagtccaaattttaagaacgatcgtggaatgacctaaaattactgacgagaccccctacgttacgggaaaacttcaaagatagcaaaaatattcgaggaaaatggtgttttcatggatgacctcaatcagatttgtttccaagttcacgcgtaaatattttgctagaaacacacatcacgactgaaaagcaatcaaacatcacttggctctttcaaagtgtttttggaatctagaacttattcactggaaatgcacagtgaaataagattacttagccgtgaccttcctgatgtaaatccgttttttacttgaaaagtaaatattatgaactatgatacacatatgagcgaaaaataattagtaacatttttcgcttcatttcctaaaatttctatacattgcttatcttggctacgaaaggatatgacacaatatatcagattgttctgaatgaaaaaccgatacgaataatgaaaatatgattatgataagaaagtcccgctcagttacttaaatagacaaaaaaatcgagaggtacgaatttcgccctagtagggaaaaaatcgaactaagagcaccttaaaataataacgaagcttttaaagttgttattcaaaaacaaaagtgaaaaactcatagttgcaaattgaaagaaacgaatacctgagcataaaaaacaagaagcttagtagtgcctttgcgtctatagcaattttttccgtccacgaatataaggaagcttttaaaaagctgattatatttttgtgccgctgttacagctggccgacactttaatatctctttgcgatgagaatctccatcacttaatgttaccttttaaattatttagttatagttgtttagctgcacgatcagaccgatctacccaataaccagcgaatttaggccgtctctaaactcaattccttgatagaaagacgtcactgtatatgttacgctattaatttattatttataattattattctgttatttatgcgttgtaaatatttaatttatttattaaaacatcaataaactgtacctgctatctgagaa

SEQ ID NO: 59 - RNA, 1117 nt, Bemisia tabaci
  source 1..1117: mol_type = mRNA
mrnaattgaaagctggatgcgacttagtcaaataaatccagggcgtcaatcagtctgatattgtggtcgctaatccagattgtccttgtagagtcgctttggaatcctcgcggtgtaaagttggtcttttcttgttcttgtcttttcccgagtcacccccgcagatctgaatggaggacatatcatcttccggcgaagaaatcagcatgaaagcgatctcaaaagtgattggagtgcccgatattcgagatgggcccactctcacaaaatgcatagttgctgagttcgtagggactttgctgttagtactcataggatgcatgtcggtagcatttgtccatcaggacaacttcgttgacgttgtgaaaattgccatggctttcgggctcattatcgcctctatggtccaggcaataggtcacgttagtggttgtcacatcaatccggctgtaacttgtggactagctgtgtcgggacatgttagcataataaaaggtatgctgtacattgtcgcacaatgccttggagccatctgtggagcaatcattctgaatgaaatcacgccaaaaacaggttacacggctgctggtaatctgggagtaacgacactgtctacaggagtttccgacctgcagggtgtggcgatagaagcactaatcacatttgtgctgcttttagttgtccagtccgtctgcgatgggaagcggaccgacatcaaaggatctatcggcgttgcgataggattcgcaattgcttgctgccatctcgccgcgatcaagtacaccggtgctagtatgaaccctgctcgatcattaggccctgcattcgtcagtggaatttgggacaaacattgggtgtactgggccggtccaatactcggtggagtcactgccagtctgctttacgccatcactttcaaagccaaaaaaagatcggatgagagctcttatgatttctgactctgaaaacaacctaacgataggagctatcttccatgtaaattctcaataatctcttgttaatttcgcgcactttgttaacctttgcgtgtggagtatactccttcgtctgttcccgcatgcacatttttaaaaataaagtcatcgttgtttttaga

SEQ ID NO: 60 - RNA, 6604 nt, Bemisia tabaci
  source 1..6604: mol_type = mRNA
mrnaaacgtgtaaattgataaaagtatttttatttccatgttccccgccttctgcctgattagttctttacgacctcgttcaaagttctcaccgctgtggtagacgaaaccgaaactttgaaactttcgccgaaactcgtgaattgtgcgctccagatttttgtgtgtttgtgttccgaatttctgcactcgtaatctaccgtttctcgtaataaatctcgctttgttatttatctaccatacgtttccgtcgggaagccagcgtttttgtgttcatagtgttcggccggctctaacctcattactgttgtgttcagcgaagttcctctatttttcgttaattcatacctgataagtgccggtccacgtttatcatttgtgttttcagtgtaactatttccgaatttataattctggtgtccgtactctctcatctggattataagctgaagtatgtgaagcagttgatttgacttgtgctgggtgcaaatcggacttttgattatgggagtgaaagtgcacgcggagaaaagagaaaaaggcatcgggactggcacaagacacctgcggctctgatgcgcggcgcctgagcacccaccccacgtcatccaccatccatccgccaacgatgagtaaatgaccctccgcccagccctgtccgacgtgaaggccatgctcagcgattgagactcgcaacccctgtgacgttcaccatctacacttgctacttcaagggaggagtgcctctgcccttcggccaagatggggacactcttccgaagcgaggaaatggccctgtgtcaactgtttatccagccggaagcctcatacacctccgtcgccactctcggagaggccggagttgtccagttcagagacctgaacgcgggcgtgaactcctttcagcggaagttcgtgagcgaggtgcggcgctgcgacgagatggagcggaagctgcggtacatcgaggtcgaggtcagcaaggatcgcatcttcgtgcccgagtccaacgtctgcccgcccgcccccaacgcccgcgagatcactcaactcgagtcacatttagagaggacggaaagtgaaatccttgaactcagtcacaacgctgtaaatttaaaatcaaattatctagaattgacagaactgaagtatgtgttggaaaaagcgcacgcattttttcaagagagtttctgtttaaaacagcaagagggcgccagtggctcgggcaacaacgactcgctcacgaaagcactcatcagcgatgaaagccagcagcagtcctctcgcggtagattagggtttgtcgctggagttgtgccgcgggaaagagtgccagcgtttgagagaatgttgtggcgaatcagtcgcggaaatgtattcctgagacaagcagaattagaggaaccattggaagaccctgctacggggaacgaaatttacaagactgtttttgtagctttcttccaaggagagcagttgaaacatcgagtaaaaaaagtatgctcaggattccatgcatcattctaccaatgtcctagctcgcacacacaaagacaagaactgctaaagggcataaaaacaagattagctgatcttaatttagtattaaaccaaacacgagatcacaagcaaactgtgttacgcagtgtagcggagaagcttcatggttggacagtgcaagtccggaagatgaaagcaatctatcacaccttaaacttattcaacatggacgtaacaaaaaaatgcctcattggagagtgttgggtgcccgtcaatgatttaaccttcattcgcaaaactcttttagatggtagtaaagctgtaggcagttcaattccatcatttctaaatgtaattgagacgaacgaaaatcctccaacatttcaccgcacgaataaatttaccgagggctttcagaatctaattgattcatacggtattgcttgttatcgtgaagttaatcctgcactgtatacaattatcacattcccatttttatttgctgtcatgtttggtgatgcgggtcatggagccatcctagccatatttggaggaatcatgatttattttgaacagatgtttctcaagaagaaatcaaataatgagatttggaacatattttttggtggtcgctacatcatattcctgatggggctgttctctatatacacaggaatcatctacaacgatttcttctcgaaagcagtcaatgcatttggctcaagctggtttagcaattacaacgaatccactattctcagtaactctgacatcactttagatcctgtttatcaatacaaacaatatccttatcctataggagtcgaccccgtttggcaaatttctagcaataaaatagttttcttcaattcattcaaaatgaagttatcaatcatatttggggtggtgcatatgatatttggtgtcatgctgagtgttatcaaccatatccacttcaaaaggaaaatgagtattattttggagttcctacctcagttaatccttcttatccttctatttttttacatggtcatgctcatgttcatgaagtggactctatatggtcctcagaacccgctaaagaccagcccccgatgtgcaccatctatcctaattatgtttatcaatatgatgctcttcaaaaacaacgaaccatttccaggctgtgacgaatatatgtatgataatcaggaatttattcagagacttatcgtttttttctcgttcctctgtattccggtcatgctattcggaaaaccgatctaccttatatattttgccaataagcccactaaacgtcacttttcgagtaacggcgaggctcaccaggggatagaattgcaggaaagtcggaacatggacgtggagacagacgtggtcacagccgaaacgcaggaaaccctggagactctgatggcacagacggagacggagcaagatgtccagcctgtggaggaacacgaggaaccgagtgaaatcttcattcaccaggtcattcacacgatagagtacgttctcagtacggtctcgcacactgcgtcctacctccgactctgggcgctctccctcgctcatgcacaactgtcggacgttttatggggcatggttctgaagattggactccaaagagagagccacgtaggtgctctagtattgtttataatgtttgccctctgggctgtgttcactgttgccattttagtcatgatggaaggtctctcagcattccttcatacactccgtcttcattgggtggaattcatgagtaaattctacacggggaccggatatgccttccaaccgttctctttcaaacatattcttgagagtgaggaatacacgtgtaatgaagaataaggttttttcaacgacttcttgtaatttacccgtattttactcaagtcttaggtataagtataccataatgttacgcttggaagcttgcgcattatacaatcattcactttttcgttgttaattttcatcttccctgataacactatctatcttgccttttattttctcttaaagcaaaattactctttagttttctttttctcttttcctacctcagtgattacaaacaagtgaaattttgttggtcttgcaatgaatgaagataatccaaatttccacaacgcctcctatcgaagcacagcaagtttcagtcagttttaaaattggaattaaaaaatctcacttaaaagagccatcagttgttaggagattttttaaaaatccataatttttttctgagaaagatattttcctctttgactccttagcctccaaatgtgaagaaagaaatttgtaaggaaaactgaagaaattttgtaattactctcaggtttcaagatttcattcctcaaaaattgttttaaaattaatagttcaagctgtgatactcagtagcgtagccaaacattattaagggggaatgcagtaaaaaatccttctttgttcattattagaaaatcctgaagtcaggtcatggggcacctcgaaacccctgactcttcaatgtctgcgtctttggtgatgctaacaaaatcttaatccaaagttttagaactaaaccctttaaatttgccaaaaatgtaaaattgtaattgtcgtttcttctcagaggaaattcaaatttcatgaaaaagtatcgtaactttcgattgagaaaaacattgtggcagagatagtgtgttatcaggacccaatgtgattttgtggcggtgagtggccccttgtgatttgctttccttcttttaaggtgtttttacattaattttaagcctctgactacagtttaagcaagacctgatcgtataaacacaccaaaggtcatagatcctgttctaaaactaagagtaagtgctcattcatgctgaggtcaaaatatgttgttccgtttgtttacttaaaatattatcatgtctttaatttctatttaaaatatcatcgaattgaaatgcttaactaaagacatgagttttgcaatggtggttactgcaaccagaactatttttgtagtcagtgtgaatgctctgtttttgtcaatatggtaggtggaaaatttttattttgttgacctcaggtctcataataccaagacacctttatgagtaagccaagaactaaaccactggatcataactgaaatttttcaacagtgatttttatgtcaaaatttttatttttattcttgtgattagtttgtaaatttttggaaccttaaaaagttgtaagattagctagtattttttttctctctttttttcttttttgtgcaaaagatagtaaaactggtagagcaaacactatttttactctgatatatttttggttttatttttgtaaacatttatctatcaagcctgatttttaataattttaaagcgtatttatcaaagctgtttttttaaaagtgcaagcttgtatgtattttcgacaggccattggcctagtttaagagaaacatggggtaataccttaagtgccaagtcagtggaggttgtgaggaactgtgaaaactgtcagaaatcaaaatttctcaaacctctaggaagaattttttagttattacttttcaacctaaaattctaaagttgtcttgaacggattgtttttatcttacagtaaatacttatgctttttttcgggtcacgaaatacgtcatactgaaggaatcaatttttttatgaagttgactgaactctgttttccaatggccttaaaagttatctttactcatccattgcgtacaagtaacgtgatttgagtcatgtggcactgctgcaatctgaccaagatgttttgaaaaactgaatcctgaatatcaaaaatttgttaatgaaatatcaaaaaacaagtttattttccctttgaactgttacagagtctttttatatttcaactttcattctttgtattctaaactgactatcatcacaaattatttttatactcgtttagaaattaatacttcactcttttactcggttcttaaagcctccttgtttccaatattttcacttaaatctgagaaggcttattttgctctacgattatcaaggtacaaatatttttgtttaagatttttttactttaattgctggtgtatttttctgactattggattatatcgtaccaaccctttgctatgcatgccgaatcaaatgaaacattttaggcaccatcagttcaagcaaattgcatttcctatttgccctgtggtagcttagattttgcaggcaaaggatttttgatttatctagattgttcaaatgctcccttgtaatcacgcatgctcatcatatcatgcattatcaataaaaccaatgctctgcctttcgtttaaaattttaggaccactttagccggaaaactcaatttttagaagccacctacaggttttaggagcaaaattaacttatttcatacgcatcatgactgcaaatcgtgcgttgagagcatcactgctgcttcatgactgcaagtttaaagaaattgacgaagtgcgtcaactttttaggggccacgatggcctagtcccctctatctttaagcctcaaagcctgatttctagacgcatttggtgaatggtatctggggaaggcagaagactggataaaattcccaattttatgaagtttgcaaaattatttgttttatctttggaaacttgcatcatacatcatagtggatcacttactctgtaaattttgcccttacttcttgtgcgagaaaaaatttagaaagtttcaaagtggcttgtattatcaattcctgccttacttcaagaccaagtgagcacagaaatttgacctcaaataattttgactaaaactataattttagggaccacataaaagacaactcagcctattttaagcctctattctttcataagtttttttcttttctttattaaattttattttatttttccactcattgaacaccaataattctcaatgactagtttttgtatcatattttgtaagatgtatacttgtaattttaagtgccttgtgtataataatgttgatgaatgattctaccttgttgataaactgtttctataattacaataaaatattaccaaaaacaa

SEQ ID NO: 61 - RNA, 7155 nt, Bemisia tabaci
  source 1..7155: mol_type = mRNA
mrnagggagcgacgccggtgcctccttcaaccgccggtggcgccacctcgcggtgacactcgcagtgaaagtgttccccggggaaaacgccatgagccatccagcccgggagcacccaacctccaccgcctaggatcgcgacgggacctccattgctcagccatccggcccgagggaccaaaaatcggtcatccggttagaggaactaacactcagctattcggttcaaggaaccaacattcagccatccagctcaaggaacaaacactcagctattcggttcaaggaaccaacacttagccattctattctcggggccaacattaagtcatccggttcgagggaccaaagacttcctcgaaaagcgtcatcgaatcgggatcgttcattcgccattatatctaagtgtctctagaggagagtgtcctggttaaacagaagaatcaatccaatcggctggttgatcagacgataatttccatccggctagatgcgagcaaaagttaggaaaaagcaagctacgaacactcatttacagctgtgtcgtgcggtttagttaatcgaatcacttgaatgttaccaaataactaggcggagatactgccgacttaaattttagaattaaaacgattttagagataaattccgcgagtctgtgatacaaaacgacgtggataggttccatcgtcgcacagcttttaagtcaccgagtacctgattacgttgcgttagtttgcgtgacggtagtttacgttagttttaagttcggacgataacgtatgcgcgcggaaagaagcacgagggcagaagagaggtaaagcagcacttggtctaacaaaataaataatgttaaatacgagcagagccttgtttacgatcagggaatcaaaagaaaatgatatttgctttgatcgcattgagctcagcggtaaaggccggcgtgactttggttggcgcgagcgtgtggttggtgccgttgctgatagcagccatcgcttactatagatacgacatgtttgacccggagagcaggatcaaaaatcaggtgcagctaaaccgggagtacgacttcatcgtgatcgggggcggctctgcgggggcggtggtggcgagccgcttgtccgaagtcccccattggaccgttctcctcctggaagctggacctgacgaaacagagatctcagatgtaccctctctcgccgcctacctccaactctccaaactcgactggggatacaagaccgaacctacaggtcgaggctgcttaggcatgaagtccggtcgatgcaactggccccgagggaaggtgctcgggggctccagtgtgctcaactacatgctctacgtcagaggcaatcgccaggactacgacaactgggaagctctagggaacccgggctggagctacaaggacgtgatacactacttcctgaagagcgaggacaaccggaacccgtacctgacgcggacgccttaccaccgctccggcgggtacctgacgatccaggaggcgccctggaggaccccgctcgtcgtcgccttcgtcgcggccggcgaggagatcggctacaagaacagggacatcaacggcgccgagcaggctgggttcatggttgctcaggggacgattcggcggggaagtcgatgcagcacggcgaaggctttcttgcgcccggcgcggcaccgacgcaacctgcacgtcgccatgggtgcccacgtcacgcggatcctcatccacccgcacaccaagcgcgcttacggggtccagttcgtcagggacggcatccaccaggccgcccttgcccgacgagaggtggttttatctgccggtgccataaacagtccgcagatcctgatgctgtccggaatcggtcctagcgaacacctgcacaagcacgggatccctgtcgtggcggacctccgggtcggggacaacctccaggaccacgtggggctcgccgggggcctcaccttcaccgtcgacaaacccgtgtccatagtacaaaatagactccaggcggtcccggtgacgatgagctacgtggtgaaggagcggggtccgatgacgacactggggggcgtcgaggggctggggttcgtcaacaccaagttcgccaacgagtcggggttgtacccggacatccagttccacatggcccccgcctccatcaacagtgaccagggctcccaggtccgcaagatcctcggcatcaccgaccgcgtctacgatctagtctacaaacctataggcagtaaggactcctggactatcatacccttgctcctcaggcccaaatcctcaggttgggtgcgattaaggtcttcaaacccttttgagtacccgtatattgatgcgaattactttgcgcatcctcaagacattgccacactagtggagggagtcaaaatagctttgcaggtgaacgcggcgtcgcccctgcggcagttcaactcccggctccaccggatcccgatccctgggtgccatcgtctagccttcggctcggacgcctactgggagtgcgccatccggcacctgacgatgaccatctaccacccggtgggcacctgcaagatgggtccctcctcggacccgacggccgtcgtcgacccgcggctccgcgtctacggggtgagccacctccgcgtcatcgacgcctccatcatgcccaacatcgtctccggcaacaccaacgcgcccaccatcatgatcggcgagaagggcgccgacctcatcaaggaggactggttcagtggcgccttcgctcccactgtcttccagatggtccccgcgggcaaactgtttctggaggtggccttcgggatcctgacactatgctccttcgagaacgggttctcgatgggccagtacgggccgaacgagtcgcaagaacagctgcggctgttcgagggtctcggggccgtgtttttggacggcgagaggttctaccgctccgagcccccagagacgaggaggattttatccgcctacgatttcatcatcatcggggctggatccgcaggttgcgtcatggctagccgactttccgagatacccgattggaaggtcctgttgatcgaggctggacgaaacgagaactacttgttcgacattccgctggcgacatcgtttctccagttgacagacgccatcaactggaattacacgccggagccgcaggccaacgggtgcttgggtatgaagggtggcagatgcgcctggccccgagggaaagtaatgggcggtagcagcgtgctgcactcgatgatccacacccggggcgaccggcgggactacgacgcctgggccaacgctgggaacccaggctggacctaccaggagctcctgccctacttcaagaagtccgaggacatgcagatcccggagctccagcgcgacaccaagtaccactccgtcggcggctacttcaccatcacctaccccgtctaccacacaaaactcgccgaggccttcgtccgcggcggcaagcaggctggcttcaacatctcagactacaatgcagagagcatctctgggttctcctacatccaggctaccatcagaaacggtacacgactgagcgcctctcgggccttcctgcacccggtgcggaaccggccgaacctgcacgtgctgaagaacacgctggtgacaaagatcatcatcgacgaggagacgaagaaggtgcgcggcgtggagttcgtgcgcaattcgcagcgcttccgcgtcaaagccacccgcgaggtcatcctctcggccggcgccgtcaactccccgcagctcctcatgctctccggggtagggccccaggaccacctcaaggagctcggcatccccctgctcaaggacctcccggtcgggtacaaccttcaggaccacattgctcttggtggcttgactttcctggtgaacagtaccgtctcgatcaagatggagaggatactgcgaagcgccaaggcactgaatgactatgccttatacaaacgcggaccattggccgttcccagtggatccgaagccattgccttcatagacaccaaaagaccttttgaccccgacggctaccctgacattgagttcctcttcatcggaggaagctacccctcaaacccccttcacaggtacatattccggatcgaagacacgctgtacaacaaggtgttcctgccgatccagaaccaggacgcgttcatggtgttcccgatgctgatgcggcccaagagcaccgggcgggtcatgctccgctcggcgaacccgatggccaagccgctgctcttcgccaactacctcaccgtccaggaggacgtggacaccctcgtgcgcggcgtccggtggatgcagagggtcgccgagaccccggccatgcagaagtacggagccaagatccactccatccccatcccccagtgcgagcacttcggcttcgacaccgacaactattggggatgtcaggcgaagcacttgacacagacgatctaccacttgtcggggacgtgtaagatgggccccgagtcggacccccgctccgtcgtggacgcccgactcaaggtgcacggaatcaaggggctgcgcgtcatcgacgcctccatcatgcctgacgtcgtcacgggacacaccaacacgcccaccatcatgatcgccgagaaggcctccgatctcatcaaacaggactggatgaggctccagtgaccccaccactacagccgataaaagatgctgctgactgaagaaatcaacatgagatccgattgcgaaaatccgaacagcaaaaaatgcgtacaggtgggcggcccttggcgatggaagggataattaaatcaaaattactagtcgaagcgcacaagaacaatcaggactctagtcgtcattcatttgaagagagcgggacaatttttgcattttgcgaaattactcttcatgtcatcaaatatatagaacattgaaatgaagagcctccatgaacagtcgccacgctattaatattttcgggtgaaatttttaacacgaacataaggcaagaacaattttcgcaaaatcctaaaaaatcccagaactgagatggcgtttagtttttgattatatgggaacaggtgactgtaatcatgctcacaattggacggatttctaccaaacggagctatgtgcattaagacatgatccctaagacccataagaatacatgcataacggggctcacgtcataatgcaaatagttccgtttgacagaaatacgtccaattatttcatcgataacgacacgcaacaaaaatgatcataaaggcaaagaagagttccttacctcccaagacccgaaacccattgctgttggtctattttccacttgatctaaagacagaggcaatagactagtcagttaaataaaatatttcagagttccttcgagcgcgaaatatttttcaggaggaaagcacacacatttattattgtggtagtaattttgatcagttttttgactacacctttaggaatctttaatgaaattgaaaaatattcctgacatgcgacaagttctccggttttcttcttggaaacagtggcgtagcgttttttgcgatacatcgattgatctaccatttaaacacatgataaaagatcgataaactgggtgttcgcaatgagcacctcaataatcgattctttaccacagcttcaaatggggaaaaatcgatgatcgatcctgtacgactcgccactgctcggaaatgttttgcgtgagaagtaacactgtaactatgataagattctctttcctgacgtggcagaacaatttggagtaaatatcaccttaatatttggggcaaaaatcaccccgcatttgaacactcatgccacaatcccaatcatgttgagatggggtccaaacatcctccctgaaaactcctacgaatttatcgacgttaaatgcgtcaattttggtcgctgaagtcaattatttagtcattagtcattatatagtactctgttatgtgccgatagttgtacgaaccctgaattcaggcgcttgaccccagaaaggcaccttaagcacgcatcaacataagaaatgtacagttggttttttagatcctcaagaggcctgtgaaaaaggtctgggtttgccctaccccttggattgatttttactgattggttgcatcttttctgcagtggcgagctttgcgatatatcgattgatctgccatttaaaccaatggaaaaggatcgatcaacaaggtcttcgcgacgaactccttaataatcgattctttactatagcttcaaatggggagatatcgatagtctatcattcaggcctcgccactgcttttctgcaaacgattgtgatgggtagtaacagtgccttaaaccttatttaccggctgaatgaggggtcactgtagaaaaaaaccaaagtcaaatagattgtaatctagtcatttaattgtaaactgtagtgaagaatttgtttttgtacacgtttgttcggatcttattacaataaataatacttgagggcaattcctatgaaatttgtttcaaaatttgggcaaccatttttgagtttcgactagcgtcacctacgagtgcgctttaaacgcgtgatgtctttgatggaattgcattgagtttgtgaatagcaaaaatcggtggcattcatcaagtattgatccacaaaaaaattgacgaaaaaatcctcaaatttaaaaagttcacggtaaattaatacacatttttgaaactaagtgagttttcgattgatcgagtccaattatcacgacatctggagaggtgtctcaactaaaaacaaaatgattcagaattcaacgagtagaagttttctagaaagctgaaaatgtttcttcatttttataaaattcacttctaattatgtttttctcagtcaaaaaactacgactttcgaacaaacaatataaaatgatggactaattatacaaaacattttactgctttctaatcgaaaatccaaaagttttgattcaaaagaactaagagacttgtttgctctaggttaaaccctcaccagacctcatggatcctcgaattccccgaagtaggaaagataagaatatctcgttgtagctcttaagtattatgtaaaatgtaaataaataaaaaaattaaaaactgtgaaa

SEQ ID NO: 62 - RNA, 928 nt, Bemisia tabaci
  source 1..928: mol_type = mRNA
mrnaaagaaatccgcgcatgttaccaaattgttggatctgcttctgacggccataatacagtaacaatggcggataaggaaaagaagactaagaagaagaagaaggaggagccgaaagaggaggctccccctccaaaggaaccaactccacccccgccagaaccagaaaagccagtgtctgtaaagaagaagagttcctcaaagaaagttaagaggtccggcagtaatgtcttctctatgttcacccagactcaggtcgctgagttcaaagaaggctttgctttaatggaccacgacaaagatggtatcattggcaagaacgacttgagccagacctttgaccaggttggtaaactcgtcaatgagaaggaattggacgccatgttggaagaagctcccggcccaatcaacttcacccaactgttgtctcttttcgccgctaggatgtcaggaggctctgatgatgatgcaactgtgatcaacgcatttaaagcttttgatgaaggtggcatgatcaacggaaaagctctgaggcacgctctgcaatcctggggagacaaattcgaaaagaaagaagtagacgaaatctatgacaacttagatttggacgacaaaggctacttcgaaactgatgaaatcatccaacttcttttgggaagctccgaagatgaataaacaacaacctatccgcacaaacaatttttccaattctacctattaagtttatctgtttaaagatatttttatcaacctagattaataaattatgttcaataaattgtttctaaaaaaacgtacgagcacggttcacgattatttatttatttaattattttatcatcaatgtttgtcagagtgtacattttttctttaactaattatgttttttaatcgctaagaacaataaaggttaacaactttccatcaa

SEQ ID NO: 63 - RNA, 7068 nt, Bemisia tabaci
  source 1..7068: mol_type = mRNA
mrnatctcgcggctcaaagaaacggagtaaaaaaccgccgcggcacccggagccgccgctccgcgccgagtgactttcacttgtagtcgccgagtcggccggcagagcgcgcgcggatcgccgcccgccgtaactttcccctgtgcaaatgaaatctaagtcagtaacttttgtaatggccatgttgccaggtgccaaacagctgttctgtgttgtgatttggaccgtgttctcgcttttcatcctcggcagctatgctgagagacgctacgcctacacagagaagcagcgatatgacgggtggttcaacaatttggcgcatcctgattggggctccatcgatacacaaatgacacgaaagacgcctccggcctacgcggacggagtatacatgatggccggtcaggatcggccgagccctcggcgcctgagtacaattttcatgaaaggggacgacggtctcgcctccgccaaaaaccgcagcgccatcctcgctttcttcggtcaggtggtgagctccgaagtagtcatggccagtgagagtggttgtccaattgaggtgcatcgcattcaaattgacaagtgcgatgagatgtacgatccagactgcgctggggacaagtccattcccttccaccgtgctggctacgacagcaagactggacagagccccaacaaccctcgccaacagataaaccgagtgacaagttggattgacggaagtttcatctacagcaatagtgaggcatgggtcaacgccatgcgctctttcgtcaatggttccttcaaaactgatccaactggcaagtggcccgttcgaaataccatgcgagtacccctcttcaacaaccctgttccacatgtactccggacactttctccggaacggctctttttgttgggtgatcctcgaagtaatcaaaatccagccctcctaactttcagtatattattttttcgttggcataatgttattgccaagaaagtgcaggaagcccatcctgagtggtcagatgaagaagtttttcaacgaacaaggaggattgtggtcgcaactctccagaatatcatagcatatgaatacatcccagccttcacaggtctagaattaccagaatacgagggttacagtatagatgtccatccgggcatcagccatgtttttcagactgctgcttttaggtttggacacacactgattcctccgggtatttatcgaagagattccaagtgcaatttcagaaaaacacccaagggtaaaccagcacttcgactttgctctttttggtgggactcaaatgatgcagtctcagagagctctgttgaagaactacttatggggatggcatcacagcttgctgaacgcgaagatactgtactctgctcagatgttcgagatagattattcgggccaaatgatttctctcgcagggaccttggtgcactcaacatcatgcgaggacgagacaatggtcttttagattataatacgattcgaacctacttccaccttccaaaggtaacatcgtggaaagacatcaacccaaccttactcggaaaacatccagaattagtgaaaaaaatgtcagacgcttatggaggctctctagataatgtagacctctacattggtggaatgctagaatcaactgatggtcctggcgagcttttttcatccattatcattgagcaattcacaagacttcgagatgctgataggttttggttcgagaacaaagacaacaacatcttcacagaagaggagattgctgacctgcgaagagtgacattatgggatgtcattgttaacagcactgatgttccccctgacgcaatccagaaaaatgttttcttctggaacgatggtgatccatgtccacaaccagcacaactgaatgctagccagctggagccatgctcttacctcaagggctatgactattttgagggaagtgaattagctttcacctacgcaattgtcttcttgtgcgttgttccattaatttgcggtgctgcaggatatggagtagtaaagttgcagaaccgtcgacgaagacaactgagaatgaggcaagaagaacttaaatcagggccagtcaaaacctctggcctagccacagtcgataaaatggctgtaagggagtggctccacgcaaaccaccgccgtctggtcaaagttcgcttcggaccagaggccagcctacacacagtggatcgcaaaggagaaaagctgaggtctgtcaacttcaaaaatgctgatactatcaccattgaagaatctctggttgatgaaagagggaaacgtaaacgaccaatggtgttgatcagggtgcctcgagaccatgacttagtgctggaatttgattcatctgcagcaagacgcaaattcttatcaaagatggaaggtttcctgaattcacacaaaaagcatctgattgttgttcaggctccacgagagttaatgctggctaaagcagaaacaagagaaaggagacaaaagcgactggaacatttcttcagggaagcatatgccttgacgttcggcttgaaacctggcgaaaagcggaggcgggaagatgaaggtggagaggtcgttatgagaacatctctatctcgagctgagtttgcctctgctttgggcatgaaaccagatgctgtttttgttagaatgatgtttaacattgttgataaagatggtgacggacgaatctcatttcaggaatttttggatacagttgtcctgttctcacgaggaaaaactgaggacaaattacgaattatctttgacatgtgtgacaatgatagaaatggagtaatagataaaggggagttgtcggaaatgcttcgttcactggttgaaattgccagaacaaccagtttgtcggatcaacatgttacagatttgatagacggcatgttccaggatgctggtcttgagagcaaagactttttgacttatgatgatttcaaggaaatgatgagagactataagggagacttcgtggcaataggcttggattgcaaaggagccaaacagaatttcctggacacatctacaaatgttgctagaatgacaagtttccatctggatccatctcttgacgaggaccgcagctggttgaaaaagaactgggattgtctcacaacattccttgaggagaaccgacagaatattttctatctctttatattctacgtcatcaccatttctctcttcgttgaaagatttatcaaatattctttcatgtcggaacatacggatctgcgacacataatgggagtagggatcgccatcactcggggctcagcagcctctttgtcgttctgttattgcttgctgctgctgaccatgtcgcgtaacctgctgacaaaactgaaggagttttcaatccagcagtacattcctcttgatgctcacattcagttccacaaggtggctgcgtgtactgccctctttttctcactcttgcacacggttggtcatatagtcaatttttaccatgtctcgaatcaaccgctggagcaccttcaatgcctcacatcagaggtccatttcccctctgactacaaacctggcatcacattctggctgtttcaaaccatcaccggaattactggggttctcctttttgttgtcatggtcatcatttttgtgtttgctcaccctacaatccgcaagaaagcttacaagtacttttgggcagcacatagtctttatgtggctctttatgctctcatgttggttcatggtctggcacgaattacaggcccgccaagattctggatgtttttcatcggtcccggtatcgtctttattttagataaggtggtgagtctgcggacaaaatacatggctttagatattctagaaacagagctattgccatccgatgtaatcaaaatcaaattctatcggcctccaaacttcaaatacctatcgggccaatgggtgcgcctagcatgcacagcattccgtcaatccgaattccattctttcacgttaacatctgcgcctcacgagaatttcttatcatgccacatcaaagcacaaggaccttggacgtggaaactgaggaactattttgatccttgcaatttcaatgttgaagttgatcaacccaaaattcgattagaaggtccatttggtggtgggaaccaagactggtacaaattcgaagtagcagttatggttggtggtggcataggtgtcacaccttacgcctccattctcaatgaccttgtctttgggacgtcaaccaatagatattcaggagtggcttgtaaaaaggtttatttcctgtggatttgcccctctcaccgtcattttgagtggttcatcgatgtactgagggatgtggagaagaaggatgttacgaatgtactggaaatccacatatttattacccaatttttccacaagtttgatctgagaacaacaatgttgtatatttgtgagaaccacttccaaagattatccaaaacaagtatgttcactggtctaaaagcaatcaatcattttggacgtccagacatgtcatctttcctgaaatttgttcagagaaaacatagttatgtaagcaaaattggtgtatttagttgtgggccccgtccactgacaaaaagcatcatgtctgcttgtgaagaagtgaataaaggaagaagactgccatacttcattcaccactttgagaactttggatgattttcaaagaagaaactctttaggtctcaattttttaatttctgcctgccattttgtattatagattgttaatgttgtacattgttaattgtgtttatttgtaaaaaagttacctgtaatttgtttcctatttttggcgccagagcaggttaaaaatgtctggcgacaattctgtaaatggcttcaacaagcgttaaacaaatgttttgtattattaatcaaatactttgtattcatcaggttttccttttttattgttaattagatttcagtggttgtgagtcataattctattttcatttaggctaagaaaactgtcactatcaaaaaaaacatctccttgctaatcagtaagttatgtgtttcacacaattgctttgatgaatgaatttcagagctggcaaaaaaaagtcgaatccgtccaaacgcaaaattttaatgtcttatcagggatcattaaatgctctcgtgtaatgcaggcagtgatgcattttcattttgtaacaaacatggttgtaaatacctctcctgatcgaatatacttcatgtaaaagttaaacttgggagtgaactttctttaaacatacttttattaattgtaattgtattttttttttattgtagttatattacaagtgaaataaaaccattcgaaaatatttcataattcagctctggactcaacaaaactcttgacctgttaataacaatttctgtgagacacataactgatccatcggtaaaatgttcatgcatcaccgaaacattgtttccgaggaatccaggctaaactagagatttattgttgaagtcatcagaaaaaatgaatatcagtatctcatataatttccatctttttagagcagttgtataaccgattggttgctggtcataattgggaatgacagggacattgttgtgctggacagattgtgcatttcagcaaatgtcttactattgggtttccctcagccgtgtcaattttgccaaagctctattcaaacgcaatttaattttactttctcgaagagtcccaaaagtcttcagactggtggtgtcttgactccaaaacccaaataagttacccacattcattgccagcaatcatagttttagagttaccacacaagtttcacatgactttagggacagtctatttagaataagtttagagctctaatcaaacgaggctttgcatctgcatgagagtaccagtgccattgatatttgggctcaagctttccgaagcccttgggacaaagttttccttttttgaagagtgctttgttgccaacctaagtaacgcaacaaaactatgttaccattcagcctagttcttcataccttttgtcactatctatttctttcattaaagatcttacttgagagattgccttttgatttctgctgacctaactctgccataggagcttaattcatgcaactgactccatattttctaagccatgtacagctgtggtgattttattgcactttgaattgaagaaaattgaggctattaatggcttaaataaagctaagtttatttgcaaggatgtaacaattattcagtcttatacctttaattgttgggaaacaattttcattttcagtcaagtagcattcaagatgttaaaaataaatggtcatgaagaaacagtcctggccctaaagcactgtcccaccaggatcgacaatgcgcatgtttcatcatgaattattaaattattttatgattgatgcttttcctctctctttcttttaaaaataggttatttttgttcttttcttctttttctattttttcttttaatgtttctaatattgaatctgtgattttgaccaatggaaacctggacttgaaccagagctaggtttcctgagtatttatttttgagttggtttttttttttttacattacgctccattctaccctttgtttttatgagttcagtcaaaatttaagctagaaatgtgtataaaattgatttaggttaattaaacataatgtcccaaagccatgcatctgagggtgtatcggcttatttatacagcattttaaattatttctatcaccctttttaggtagaaataaactgatgttgattaagtcggtgctaaacagataactctgacgtaggaacttccagtacattaaaaactgtatattttaactgtgtgtaatttttcttcatctttaaatgcggtcacagttaacagtcagtccctatttcaaaaaagccatttttataaaattttcattaaatttaatcattcttgtatttagcttttagaaacacctgtcgccctttattcaaccagaaactttcaaatggaataggcaaagcattgttcctgcgtcaag

SEQ ID NO: 64 - RNA, 2014 nt, Bemisia tabaci
  source 1..2014: mol_type = mRNA
mrnatttctcgactttacttacccgcaagccttgtaggtgaacagatcgaacgacattagggagttttttcccgactgagctgctacctctaccattttcgtcagtgaatacgtgatcatcgtttctacgtttaaattagaacgatgcccagcctatcaattttactgctctcgttattatgctgttcgaatctacaagtgatccagacaaccccagtgttggactggtgggaaacgacagtcatttatcaaatttatttacgttcattcaaagattcggacggagatggcgttggagatctcaaaggagtgtacgagaaattagactacatcaaagaaacaggatttgaaaccgtttggattcagcctttcttcaaatctccaatggcagatatgggttacgatgtcgcgaattacaaggaaattgaacaaatgttcggaacagtgcaggattttaagaccctggttcaaggtatccatgacagagggatgaacattatcatagatttcattccaaatcacacaagctcggaaaatgagtggttcaaactttccgaaaatagaatagagccatacactgattactatatttggcataatgggaaacggtttaatgacacacatgtcacagaaccgactaactggttgcatgttttcaatggaaaagcgtggacctggagcgaaaaaagacaacaatattactttcaccaattctctcccaaacagccagatctgaactatcgaaatcgaaatgtgcaacgggaaatggaggatgtgataaagttctggctcgatcttggcgtggacggtcttcgagtggatgcagttgattatttgtatgaaacagacattttactagacgagcctgagctaccacccggaccaggcgtcagcggttatgagagcttgaagcacatttacaccaaagcacaaccagaaaataaaatcctcactcacagttggcgattagtcatggatgaatacacaaaaagggacaacaaaacaagactcctgattttggagcaatatgctccattgaagcagctggttgcattccaagggaattcgacttatcccaatgcgcatatatcgctttattttccgttaatattctacagtcatgagcaaaatgctaccgttttagatggaattattcgtggttggtcagatattcaaccagacaaccatccaccaaactgggtgattgaaaatcatgatcgctacagagttgatcatcggaagggcgcggaatttattgacgcgatgaacatgattcacttgttattacctggagttgcgttcgtgtattatggggcagaactcgctgttgaggacaattggactattcgtaagggacaaatccgtgatccgaataattatggacacggaattacgacctctcgggatcctagccgcactcctatgccttgggatgatactaaaaatgccggtttcacaaggaatcagaagccatggttaccggttcacccaaactactggcgaaagaatgtaaaatctgaacagaaagaatctaaaagtagctacaaaatatttaagcgactattggctttacggcgtacgccagtcataaaatatggaaaatttcaaactttcgtcatgagcgaatggacatacatgttcacaaggagtacctctagagatgatacagtggctgttatcataaatctaggaactgaaacggaggaagtttgtgctcaaaattttgcagtaggtctgcccgacattatgacagtttacacggcctcgttaaattctggatttgacgttggggatagaattacgacatcaagggtcaacggaggaaagtgtgctgagttaagacccaaagcaggcttcgtccttagtgtcaattccggcagtagcttgctttgttctgcgtacctaattccccttttagttttttttttttttttgtatacttaaataatatttcataaaccttgcgtattttaggaaaaattaaatattagtaaaaacttttttgaaaaagaaa

SEQ ID NO: 65 - RNA, 6196 nt, Bemisia tabaci
  source 1..6196: mol_type = mRNA
mrnatcggttttatctttatcaacaacttttgaattttgaattttgattcctaaattttagttgtcagctggatgtgtgaaacttcaagtgtatccgtgtgaaaatgccacataaatgatgtaaaacctcacttaatcttcttatttttactcagaaaggcagatgtttcatcaatcttaattgcgtgggttttctgcgcttgagcctacaatggctaattttactgtcggcagccgcgttgaagttaccggcaaagatgttcaaggaacagttgcatttattgggccaacatcattctctcaagggaaatgggttggaattatcctagacgagccaaaaggaaaaaacaatggcaccatcaaagggaagcagtattttcagtgtcccgacaactatggaatgttcgttcgtcaaatgcaactcactcttatcgatgagagtgggaatcgcattgatatggccaattctggatccacgtctctaacatccctagatgactcgacctcttctaagctgacacctccaggacagcgttccaggttgagcagctctcggttatctctggccagttcaaaaagtggctccactccgtcaaggagcaaggaagatgtgcgactatccaccggaaccctcgctgactcttcgttgtcagacaattcaacaccgtctgaggccaaatccgctaatggtcagcaagatccaccatcgcttcagaaacgtgcatccttcgtagagcaatctaaaaactctccgtctactccaaagacctccaaactgacctccaaattagttgctcctaaagtgagatcgaaattttcatctcccaaaatacaggctaataccagtagtagctccaatgtcgaacctaattccaattcgcttgaccaacaaactggttttgtcgaaactttgaaaccgcagttcacaccaggtcaagtcatgcaaccagcctcaggtccggcatcaacgcaaagaccacctccgggtcctgtaatcgacccagcagagcatgaggcactgaaatctcaagtcaaagatttaactgaaaagttagacacaatgagactgaaacacaaagaaaagacgcaaacactggaagccatgaaaattcagctggaccaagctgctgagtttaaaataaaaattatcgaatcacaagctaatttgaagaaagacatcgaacgcttgaaaaaagagaagcaagatgctctagaggccaaaaatgaattttctgacctagcagaaactttggaaatggcaactctcgacaaagaaatggcagaggagaaggcagaaacgttagagttagaactggagcaagcaaacgaaaggattgaagagcttacacttgatctagaaataatgaaagccgaacttgaaaaaatcactagcggacacaatgcagaaatcaataatgaagatggagcgcccgtcacaaactatcagctaaaacagttagagcagcaaaatatcaggcttcatgaaactttagtcaggatgagagatgtttctgctcatgaaaaacatgaaacacaaaaactgcagaaggagcttgaacaacgaaaagcagaaataaacgatttaagaaaaaatacggacaaattaactgctcgctgtgctgagttggaggagcaagtggctgatctacacgaacaagtggatgctgctttaggtgcggaagaaatggtagaacaacttagtttacaaaaattagtcctggaggaaaacgttagtaaattgcaagaggaagtatttgatttagaagctctgaaggacatcagcgatcaattgcaagaagacagccgagagcttgaacttcaacttcgtcaagatgtcgacatggcaaatgccacaattagagaggtccagaaagaaaaagaaaacgccttggagatgctagcagatagggaactaacgatcgtaaaatttagagaactggtcgcaaagctaaaagaacgctgtcaagagctggagcaccaactggacagggaatgcaacagtaaggcagccatgagcctgagcattccagagatgctcgactacaagaagattttcatagactcaaaagcgctcgcacgtgccatagacttagaattaagacgaatggaagtggaaatgttgcagcagcacgtgaatctgctccaggcattcatgccggattctttcatgaaaggcagtggtgatcatgacgctgttcttactttgctgttgattccccggctgatctggaagagtgagatcctaatttctcaaactagggataaattcccagcaatagaaattactactaatcgggaagctctcctcaaagatcactcagctaatcaatttgcagcgcggtcgcgtttttgttcttatctctacttcttacaggctgtgctgcggcagttccttaatggactcaacacttgtccaccagatcttctgatgaatatagcaggcatttttccggagttgaacctccatgagaaaactatagatagctatgtagaactattgcgaacgaaccaactagatgaaaatgtcaatactgatgcgttagagaagtgcttgaattacttttgtgccatgcatccagcgtatctgcttcgagccggcgtgaacctacaccaaagctttttgctctcggactatcacaaagcattttcagcggctattgatagcctccgcactgatgctgcaatcatcaatgccgtgatgcagccggaatctaacccacacgatattgaacttttgtgtcagcacttaatgacatcgtgtgaagtcatgttcacgcacttgaaaccagtccgattactcctgtctagctcacctggtgctgagaaaacagctgattttggtcttggagaaatgttcttgcagaacaccttatctcaagctcaaacacatgcaatgaaagcctcaaaagttatccgtgatatagccagagtttccttttcttcaattgtaatcactggagctgttgacaatgaagtgggaattgacaagaacaaaatgttcgaaattgccacgtcttgttgtgatcgtgtgtttgatgatacattgcaagggccagttgctgtgatcaaaaatgaaatcaatgccctagctgcagatattgccaatttagcgcagacgattcaagagacaattcactcatcatcaaacgttgctcaggcgaaatcgaaatcttccgttgagattacgccaccaattatggttcgtgccaagcagaccaaagaagaattaggaaacaccaaagttcttcgaacgaagatcgaggctttggatgctgacattcgtgagttaaaaatgactttgagagccaaacaagaagaaatcggggagttgtccgtgaggaaagagttagcagagaagaaacttgcaaatgctgtcagagacaatgaattcaatactcaaaaattacaacggaaattagaagaagctcagaatcagctcaaacgaaaagagaaggagtttgaagagacaatggatcatttgcaatctgacattgacaacctggaagcagaaaaaggagaactgaaggacaaactgaagaactactccaaaaaagcatttatcgagggtgttgcagccaagacagtaggcggttcgttaacatcacctgttcacagtggagggcctgtccaagtgatcgagtcaccactgcttcttgacgagatcgataacttacggagagccctggatgtggtgcaaatggagaaagggcagctagaagcgcagtattgccagaagattctggatggcatgaaaccgttgatcatcccgcagaaaccaacaaaaacgaaattagacgaactcaaaattaaagccaaaaatctacgccaggaattattaataaagtccttaccaaaagtgcctgatcttagcaaacgaattattggtgtggagccagccttagatcctgcttatcagaagcatttccgtcagaaaaaagaaatgaaggaattgcaaaggaaagcagatgctcttgagacggaaatccaagaagaaattatcaggcaaaaagcaggtagcggaatagacactgatctaaaagtatttccaactcctgaaatgacaaaggccttcaaagagatggatcccattttaataggtgaagtagtcgttcctgtacccgccagcgatcccgacagtggtcaaactaggaaattattcttagatagtaatcaattcaaatgccttcaacagaagctcttggctatgggaacgtagaatccaatcatcaattaagtccgtactgttgattttattttcatcaatattttgtttattttcaatgctaggatccgacaaatgaaagatatctttttgtttcaattttatccctcaagagactcttttagtttttgataaatttatttttttccaaggtcctattgattttactgttggagttgcaatgcatgaaagcatacttgaattttagttctggattttagttcttttaaatcgtagatccgctcactctcgtttcggtaaagtcggtgtaattttataagtcgaatcatcaaagttttgtgaatcaccttttttcttttctttttttaagatatttgtagcgatatattaatgtaattactttttctgtgatcgatatttattaaccctgttatgcttcaagtctcttttgttatcgcatgatgaatttcatctactcccaaacataattaattaactaataaatcttagaattgacttcaaaactttatgaagaggaaccttcaatcactgttaattttgatttaccgtcataatgctcattaacttcattattgtacacataactatttttttagctcctgaaaatggctgtgttcagctggttcaatatatcgccaatcaaaactaattttcatccatttttagataaattagatttccaaagaggatgaaaattttatgtgctgtcatcaacataataatacgcattggaaactgtcagtagtgatactttttcttttactatttaactttcattagtgtggagaagtagtgtaattggacaagtttaaccttggatcagcgtaattgcatcagatgtttcataattttctctgatgttataatcttaaaacagaactaaggaactctgtaacttgaaattttgtgagaatattcctcaaaattgagggtaaattctctgaaagttaagtcagtttagttttctgtcaaaataataaaacgtcagagaaaattgagcagtgtagaatgcagtcaggcagattccagtccaatccatccaaataatcgcgtattataatatagtcagaaaatacctttttgttgaaaaacttgcgtgcatgaatgtcagcgcaagttccttttttccaagcaaatcgtaactgaaaattatggacattcattataatttattttgctttctcttttcaatactactcactgtgcttaacgtaaacatctccatgatgaaatctattccagctttcagtgttgcagatgtcttttccaattttgtttctttgaaggaggaccaactattgttaatgcacaaatgttttaaaattgttgttactctcctaaaattattctctgcaaagcacatgctaaactatctagtcactatctgttaaaaaattaaaaaatgactggagaacttgaaatactgcaagcattagaacactgcaagagacgttctattcaatttttcaaaaaaaaaccataaacaagggcagaacaagttaaaatgataaataaaattttaaatatttttcagcgcactcgcagttaagatttattaattggaatgtgtttcagggcacattaggctccatgcccagctgtcagcaaaatgtataaataacctttaagtgcaagtgagaatgctgaaaaatttttaaacattttattcacatgttatcctatcaaaactagccttttcctgttaatattgtaaatttgctcattttttttactttgatccttgtaaataatttttgtaatgtgttttaaacaagtcctgcgctacatatttattttcaaacaatactataggtgcagttagagatggaaccatcttgttggattgtggctaattttattttttcaaaagtgcaacgagaatggctaaagtgattgttcctctaacgctcactaaattccgatagtataccaaggagcgttaatgtaacataaaaatgattttaattaaagaataaatgaattgatcatcaa

SEQ ID NO: 66 - RNA, 5345 nt, Bemisia tabaci
  source 1..5345: mol_type = mRNA
mrnacctgatccagtgcccgctgatacgcgcggtcataaactcttcgttccgcggtttattgccacccgatcgggacgagtaatagaaagtgcgaatttggaggcccacgaaacgccttcatttcagagggtagactccccacgcaacgcctacgtttgagtttcccgtgtcgcgtgaatgtatcagtctctctgcggtttagtattcgagataaatatatttctcattatcattagattatagttgctctgtatggcgcttaggcactggacgcagcgctttatctagtgtggggaattattttgacgagggagttatttcactcgcaggagaggcctagtctaccgaatgtcggaaaattgtgtgtcctatcgaaagagggctgtgatgaacgtgtcattttgtcagttttgcgctcgagactgcgggaaactgtcatcgtccgtgaattttgtgtcattcctgccgcagacgtctcctacgaaaggatcaggatcacttacttgaactcacaaacccgaactcaaatcgtctgattcctctgcgatatcaatacctaccgatatatttcgtctctttccctaccttcgctctctttcaaatcctttctacacgtctccctccacgtttcctcccccgccctatcatcctcaccccctctacttcctctcccgtgcatagtgtacaggtacggcgttataaaaatttaaaaaatttaatcccgcactcattgaatagacaaaacagaaactgtcaactatgagaacggacgatatttgaaccgtcaatgatgagtctcagcaccaacacagttcatactacttattagatatttaattatatttaaaaacacatcaggttaaaaaatatccgtaatctcgatcaatgtcgagtgctttccactccaggagaatataagtaaggaattttgattctaaggtacaaatcaagttcacattgatcacctactctcattgttaacatttaacctaaactatacacgcgcgtgcacttacatccacacctgaatctgtgcctgtactttagcgcttgcctctactagtatacgtgttgatacctctacgtatacctgtcgtgatacctctacgtatacctgtcttgatacctctccctcatgtatgaattcattcctccacctgtgcctgtatttacaaaaccctcgctgttctattcattgaacctttcctgatctttttattaaacctttcctgttctacatattaaacctttcctgttctatttattaaacctttcctgttctatttattaaacctttcctgttctgctcattgaacctttcctgtttttgagctcgcgcgaactcgggccccgaagtgtgatcagataaaatcgttaacttgcactgtcccgctcgcttatatccagttttttaattctggaaaacgcgtggcatctcatgtgcagtttcgtgtggatatccggtccaagtgtctttagtgacgggcgtccagcgtgaaatcagcgccgcgagggaggtgctcggtgcgacacgacgtctaaccacgctcgctaggtcatcctcgagcaagaaccgcggttttcggcggagtttccattgaacttaggtggtttttaaatcgatgcctgaccacgctcgacaggtcatcctcgagcgaaaaccgcatttccccgcgcagtttccattgaacttaggtggtttttaaaccgacgcctggccacgctcgacaggtcatccgcgagcaaaaaccgcggttctacgtggagtttccattgaacttaggtggtttttaaaccgacgcctggccacgctcgacaggtcatccgcgagcgaaaaccgcgtttccccgtgcagtttccattgaacttaggtggtttttaaaccgacgcctggccacgctcgacaggtcatccgcgagcaaaaaccgcggttctacgtggagtttccattgaagataggtggtttttgagacctggagcgacgccctcgccccttctgcgtgaggatccggaggtacgcccaacacctggccgagatgaccatcgtcgtggctcttatctatttcctaacctcgagcgtcctcaatgtccagtcctacatcctcggccgcagagtctccgaggactcatgtcgcatatccttgagccgggacctggccacgatcccgtcgctgatgatcaacgagagcgcggggaccctcctctacccgacagaggatgacgtcatcgtcctggcgcccaacgccgagttcctcctgtactgcccgtccggcttcgccgagcgccggatccagccgaggggcatcagggtcgtctgcaagcgggacaactcggtcgtatacggcaacgccacctaccggatcaaccaactcggctgcaccaagcaccccgattccaccctccgccgaaccggagccacctgctcgcgagggaactacacgctccttcacgtgggctacgagtatgagtccgaagagagtcccagcgtcggcggtgaaggagatgatggaggaaacggcgtgggtctcgacaacgacgtcgacgcggacgaggaggagacggaaacgggtcgaaacgaaactggaaacggtatcgaagcggagacggaagtgagccgggatgaaaccggaaatgagatccgtgaagttgaggcggagacagaagtgagtgtgaatgaaggtggagacagcgttcgtgtagtcgaatcgggaatgggaacagacgcaggtgaaaccggaaatggggtccttgctgtcgaagcggagacagaggtaagtgtgggtgaaagtggacgtggcgttcaaggagtcgaaccggaaaaggtaacggtcgtagatgaaaccggaaatggggtccttgctgtcgaaggggagacagaagtaagtgtgggtgaaagtggacgtggcgttcaaggagtcgagccggaaaagaaaacagccgcagatgaaaccggaaatggggtccgtgcggtcgaagcggaaacagaagtaagtgtggatgaaagtggaagtggcattcggggaggcgaatcgggtaaggaaacggacgctgatgaaaccggaaatgaggtccgtgcagtcagagtggaagtagaagaggatgatgagaaaacggcagaagtgaagatggaaatgggaatgggtgaaaccggagacggtttccgtaccatgaagcccgatcatttcagtggtaaactcaaagttggtaagcagggaggagccgcgtcgacaactacgaatggaggaattaagaatgattttgagctgagaaacttgaaagtcgtgcccgaaaaagaaccgacggatacggaagttgacacgtccgttaccgtaaaggagagcggaggtgactcgaagctcctaagtttgttcgccggttatcggatgcgaatacaagaaggagtccacaatgttgccttcgacttgcctttaaattttaggagcactggtagcaggaaactcgctcctcttgtagttgaaaatgtccgcgcgttgggcacattcacaaccggaaacaacatgagtggtacaaacggtcgcgtgacgcgtgatgcatcaaacattagaataagacaggaagagcagacaccaatcagagacggaatgaaaatgatactaatgaaaaaaatgtttgcaaccggaagcgacgccagccttctcgatgacggttacagcttaaagccgcatgatgcacgcttcaccggaaacgatgtcaggctgactgaaagcagtgctagcctcactgcgagtagcaacatccgcatcggtggaattacgaacattaacgggaacgacggcggcttcatcggaggaagtgtaacccctgccgaaaatgcagctagctccgccggaaatagtgtaagctttaccggaaatattgaaggtctaatcgaaagtaccaccattcacactgaaggtgaacccagctatacctatactggttcgaacctttccggaggtgacgccagctttactagaaatggcgccggctccaccggaaatggcctcagcctttccgaatatagtgctaattccatcaggagctataccgctttcgctcggaacggccacaactctgctggaaatgcccatgacccgagtctcaccggaaatgaccccagtcttaccggaaatgaccccagtcttaccggaaatgaccccagtcttaccggaaatgacctcagtcgtaccggaaatggccctagtctttccagagatgactccaattttcccagaaatagtgccagtcttccaagaaacggtccgggcttcgcccgaagtgattccaagcacaccggaaacgccaaacggcggaacaggaaacggcctcataacaagagtgccacaagcgaaaacgttctcaatccagaaaaggcgtctttccgccggaggccagtgggcgaagtgaggttcatcaagctgatcgagatctgctacgacctggagcggcaccgggcggtgtacgcgagccacgagctggacgagcggatccgcggacgacagcacagcgtcccgcggatcaacttcaagacggacatcttcgacgaggagcgcatcgacgtgaacgccctgtacacgcggaaggggcagctggcgcggctgacggctctcctgggctcggccgacctggccaacgagtacatccgtcgcgacgaccatttcctcgcccgcgggcatttctcgcccaaggccgacttcgtccacgccgccgagcagctggcaaccttctactacgtcaacgtcgcgccccagtggcagaccttcaacgggggcaactgggtcaaactcgaggatgctctgagggacctcatcgtcaagcgccccggaaaactccacgtttacaccgggacccacggcgtgatcgctctgaaggacatcaacgacaacgaagtggagatctacctgggcgagaaggacggtcggccgatcgtgccggtgccgaagtactactggaaggtcttctaccggccggagcagcgggagggggtggccgtggtcggactcaacaacccctaccgtgaggtggccgagggtgacatcctctgcgaggacgtctgccgcgcctacgagtggctcgactgggacaccaacaaccaggacaagggcgtcatgtactgctgtgccctcggcgagttccagcggaaattcatccacctcggattggaggagtcggagacggtcaccatccgctcggagggccaagaggacgaggaggatgagcagggagagcgcgtcgttgaatcgacgactttcaagatggagtcaagctcaagcagcccgattcttggatccacacacctacagcacaagatgtagccctatcaagaaaaaaaaaaaaaaaaaaa

SEQ ID NO: 67 - RNA, 2009 nt, Bemisia tabaci
  source 1..2009: mol_type = mRNA
mrnacggccgggtattgtgctgctgatagctgtgattccgcggtgcgaacaaccagtccatcagtccacgcgggtctcgagcgccgagatccaggtgtcatgcatctcctttttgggctctgtttcttgcccctcctctccgccaccctcccgccgacacgcccatcgcaaaactttaaaatcgaagagcttggtgacgaagagacagcgagagacagcgtccgcggtgacgtcagaaaacgtcaagcgcaggctattgactttcaagaatgcgcggctccaaataatagaactgggcactgccgtcacctggaggattgcctgataccggagtacacagagacatatagagaaaacatcaaacatttttgcgtcatcgatgtcaaaaatgctctctacgctggcgtgtgttgcccagacgacacggcatcaaagactttatcgactcgccagattttatcacgggagagcccaatcgattcgaggatcgtcaacagcgcgcaatcaaatctcgcccaatcgaatctttgtggtagcaatgggaaaaaaacagacagaataaatgcaggagaggctaactacaacgactggccatggatggtcgccctcatgcagtacaagaaattcaagaggtcgtgggttcacttctgtggcgccgtcctcatcacagaaacacacgtcatcagtgctgcacactgcttcaatacactgaaatggcaggacattatggtacgaataggggcttacaatttcaaaaaggcaaatgaattcccttacactgactacaaggtaagagcggcgaaaatccatgaagattacgataaagctacaaatgagaatgacttaattatactaagcttggaacgtccggtcaagttcaacaagatggtgcggccagtttgcctgccgagccctcagtcggaagatgttaccacgctcgtcaatcgaactgctgttgtcgcaggttggggtgccacatctttcgggggaccagccagcagcaccctgctagaagtaagtgttcctatttgggagcatgaattctgcaaaggccagttgacgcaagtgatccacgatacaactatatgtgcgagtgcctatgaaggaggcagggatgcttgtcagggagactcgggtggtcctctctttttccagcgtactgatggaagatggacatcaattggtgttgtgtcttggggagttggttgcgcagcaaaaggaaaacctggagtgtacactcgccttacaagctacctgccttggattgctcaggcccaaaaagaaatgggagtgttcaccagttgaagcgctagactatgcggagtttcatctgaagaagtgctggatttctatcggagaaaaatcaaactctaatggatgactaaacaaagagagcgtttggaccacattcagcagaaaggaaccaagccacatcagctattgccaaattcaatagagcaatttaattttttacaagagaacgtttttgcagattcctttgacatttttgaggaatttgcttcgtactacgcagaaaattcactgaaatttgaagaaaaatccgcacaaccgtttttcggtaaaaaatttaattgcccaatttgatttggcaatagctgatgtggcttggttcctttctgtttcacgcggtccatttatggtctcataaatgaagttctaggagaagaattctaccaaaatggcgaaataatggtgacagtagaaaacatatgtatcttgtgttgcaaagttgctagtctcaaaaacctctctactaaatatttcagaattccattgattttcaactacaacaggagaaactcattgtagctaaaaagaaagatacaaccaaaaactaactccatacctagattatgaaatgggagcccgataagtgcgtaacatcgcacaacacgatttataaattcatttgcgtagagattgaacatgtgatatttttgaattataattttgaaaaatgaagtgaaataaaaaagaaaacaagaaaa

SEQ ID NO: 68 - RNA, 4373 nt, Bemisia tabaci
  source 1..4373: mol_type = mRNA
mrnaagatcattttttactgaccgcctttggtgccgcgaggtcgtcttaacggatagtgtccagattttgcagcatcctatggtgctcttttcttaattttttaagtgccgattcgatttactgataattactgcgcacgtccgtcttttcgggttggaagaacccaagtgtcctcagagttttgtggatttgacgatctcgttcaagtaactctgatgatcggtcaaatccaaagatacagtatatgctccttacattgattctttcgttggaataagactttattttcgtaaatttttcttcgacgatcttggtgtgatttgtttctaaaaatccgactgtgaattgatcagaaagatgtattattgttcgtgttgataagcggagcataggaattttctcttgaggacggctgcacgtggtctcaaaaccaagatgctcaatcacacaggaagtttgttattgcaaacaatgctgtatttggcaaactcggaattctcatctctggaattggacaacggaacagttttacaaccacaaactgacgtaacggcaaaatgctacggcgagtacgggtgttactcgataaactacccttggagtgatattctgagaccagtggcgcagtttcctgaatcgccggaaaaagtaaaccccaagtactgcctatacactcgacgcaacgccgactcgtgcgagctcttagaccacaaggatccacttacgatgtacaagtcttatctcgtccctacacatcgcatttacttcatagctcatggattcttggagagtggggacaggccttggataaagaaactgacaaaagcgctgttacacaaaggagatgtgaatgtaattacggtggattggggatcagggtcgatgcccccgtatgcgcaagcggtggctaacatcagactggttggaaggatcactgctcatctcatccagacaatgagaaaagagttgggagttcgcgtggaatattgtcacataatcggacacagtttgggcggtcatttagccggttatgtgggtcatgctttgcaagagcagtttggtgtgaagttgggaagaatcaccggtctggatccagctgagccgcatttcagtcaaacagcccctgaagtcagactcgactctacggacgcctcatttgtcgatataatccatactgatgccacgcctttcatcaaaggaggtctcggaatggatgagcccatcggacatttggacttttatccaaacggaggtgaaagccaacctggttgtgatcagagcatgtcaaaattgataaatgatgagaagggcagttttttcaaaggtttgcgccgcttcctaaactgcgaccacgtgagaagctacgaatattttattgagaccgtcaatacggacccgcagtgctcatttcttgccgttgagtgcgagtcatgggaaaattatcttgcgggcaactgcttcggatgtgatcagaaagatcgcatgtgtgcaacctttggttttaattcagttcactcgatacaaaaaattgctgccacaaggcactcgattgtaccaagtccgacaaggaaggaggtcaagctgtttttaatcacaaatagcaaagaaccattctgccaggctcaatataaggtcacagtcatgatatcgaactcaacccaaagtgtggaacatggaggcgagatagggctcttcgaaattgaaataatgggagctcttggtaaaaccaaatcaatcccactcttcagggagcagtattataaacctggaggtacttataccggggtggtggcagatgtgaacgtgggacacctacagggggcaattcttcattggcagcatcgcaccacgttcaatatactaacctggcgattcgacaatgttgtcatttatgttaaccgagtcatcgttgaaagtttacatcccagtgaaaggcttgagctgtgtccagaaggtagcagtgttttagtgtccgggcgttcaacaaatctcaactcttgcgtattttcaccggagccagaagttaaagtgagctgagcttttgcgatgtagactgatgcatcgagtcagcatcgtgctggtagacgcaaaatctgttggcgacgatttggctcttgttgacgtataataactcaaaagaactatatccatcgaatgatcgcaccatatcagccctttgctcgctggtcggactgatatggttcaaaaggcagcaaccccaagttacgggacttttttttaatggtggtcgtttccgatgaattgtctacattttcttaaaaaaaatatgcagctgagctggactgaatctactggaaaggaaaaaaatgaggaaggagttgagtttcgagtctaacttgcagcagaagtgtcaaatattgatgactccaccattccttaaaaataggtacgtaaattttgtgagtgccctaggttgaagattcgtgcttaataattaaatttatatttagaaaacaggtaactttttaacctggttatgttcctattaagtttaagtactagatacgtatttaatatccgtgtaaacaacttcttaaatagagtatattttactaattactgtaaggagtacccttaattgaacgagagattcagaataccagactattgaaaacgttcaagcttgagctggtggcagaatttatgtccattaaaaatttcctcttagatcataagattgggataatgaaccaaatattgtcctgtagggtcttaaccgagaagtttgaacttgatactctttttaggattttgtattttcgattttaaatattcctgtcatcctactgcgggtcatatattctcactcgccaatgaagataaaaactgcgactatgggtaaagtttataaaatttctgtgatctttcgtgtctgacttttcaaacgcaaattaagacaaactggagcaacttgcaaaattttcgcgttgctctattgtgttccaaagttagattgaacaacagatacctaggtattgcttgaaatgggtgtagtaaatgaacattcaaatattgagaattttaagctcattctacgcttcctgtgacttcaaagtaaaataataaattagaagatgaatgtaacgtaaaatatatgctttaaaccattagagatgaagtttgaacatggttatcgtctaaaaatgctgacttgcaatctcgtctgagagctatttagtcgatgactgataaaaaatatgatactccgtagagtttggggaatcacccggtgaaataatgaatgtatattatggagttggagtctgtaccttgaatagacaatagagtatttttgattttacttttttttaaatatatattttgtaaattaatttctatttatacctatattaatcataaattataatgtgttattggggtagtattcaacttatccactgcgccagttagaaattgctctgaactatatacctatctcgatcgtttcattgtcagttgtgcaacagcgatatgagacttatatcgctcgatgtaccaaaaagcaagcgtctcatataatcacaaagacatctctaataaaaaaataatcaatgcaaatcgctgcaaaaagagattgtaaaacatttactcattcattgagaattaatgtccctgattttttttttcaaaagtgttggcgtcctgtttgccatttatatttcatgtgtctgttaacgacaaaattttgcagtgtttcaaaactgaataataaaggcacattattggagatttttgaaaattatttgaaaacatctcttcctaacttgcatgatttttcaagtattaactgtctacctaggaggcattttttagagaaaaatttgaaacacatttcaatcaagccgcagtatgttcaactcacggcgagtgtatcttaacaaatttatttagattttaagagaattttatcacgagagctggcacagccttttgaaatacgaagatacgcaatgagcaatacgagagaatgcttcagtgtctgtctctgacatgtgcgcctttatttaaatgtgttgttgcaattattttagtctcttacaggaaaagatgggtcacaccatgtgcgtataatgtcggtaagttgtagcaatcaaacaatgttatatatatcattgatttactgtcactcattctacccacaggtactattttaaggttagacaaattgggccataaaatgaaggagaagaagattttatttcttatttgactttgtaattttgaatctattcattattttgagactattacgcctccttgccttcatctctctagggataatgactaattttgtgaatttttccttgacatgtttttatactcaataaattgttgatttttgataatcgtt

SEQ ID NO: 69 - RNA, 1458 nt, Bemisia tabaci
  source 1..1458: mol_type = mRNA
mrnaggcaggaattaaactccaccgggcatgttttcctattatggttttgcccaaaaacatagtagacatgctgagatgatgatgtttacagttatttaagagtcaaatgacattacgtaattagttgatccaaggttctgctggtggaaaaatgattgagtaataaaaggaaataagagagtggaaagaagatactgtctaacgagaccataggttctcgaaaatgaataagaaacttctgtccacttttcgtgaagcataacatccgtgctggtccaatgaccactaaacagatactcgtgaggcagatgtcgctgcaggcgcggctgaagctgcgcaagagccaacggatatggttctttctcctagccgcggggacgttaatcagcctctccctcctgttcggcgcccggcggcatcggatccacctctcccagtttctagcacctccttacaagggcccaccccccgatgacctctgggcgaacatcaacaacgaaacaggagccgccgagctcatcgtcccgaacatcgtccacttcgtgctcttcgaggacccgaagatcagcttcatgcacttcgtctgcatcctggcggcgctgcggaaccagcgcccggagaagatctacttccacgggaacgtggcgccctctggcgggtactgggagcggctcatgaagttggagcccttcaccgagcgcctggagatgcggcgcgtggagctgccgacggagatatccggggtgaagatccagcccgggtggcggatcttccacggaggtgacgtcacccggatccgggtgctcatggagtacggaggcatcttcctcgacagcgactcgtacgttgtcaggagtctcgactacttccgacgcttcgagatgtccatcggctgggatgaaaatcagttcctcggttcccagatcatagtagcccacaaggacgctcgtttcctgtaccactggctgcacagctacgacggtgcgtacgacccgaaaaagtggtactacaacgccggcgagctgcctaccacctcggtcctctatcaccacccggagctcgtccaccgcgtcaaggtcctcttcggcaacgacatgaagttcatccacatgctcttcagcaagtactggccgggctggcgggagaactacaccttccatctcctcgccagacaccagtacttgctcaaaaacatctcctccgtcgcctactaccccgtcgtcttcgacgagttcaacctccagcactaccccatcaccttccgcgagatggccaacgaggttctcgattacgagaagcaactcttggggaaacctatcaagggaccagcaggctgattcttgacattgatggacaaagcgatagacaaagaagacatagcgacggcgcaagtccgcaatcacatatcgtcaccttccaggcaaagtatcacaagcgccatgcgacgtttaaaaatt

SEQ ID NO: 70 - RNA, 2334 nt, Bemisia tabaci
  source 1..2334: mol_type = mRNA
atgtattgctgcatgatgccgtcagtcccgctaaacaaggagtccctcaaactcgaggaaatcaaccagaacgattcggggatctcgccgagctactgcagcggtgacagtcgcggcagcgcccagtcgccggcctcctcggccgaagattgcgggatctccacccggtcacctccaccgctcctgagcatcaaggaccaaaaacctctctccttggacctcagcgcccccaaatcgccgcaacccgccgttgccctgtcgcagtcccagatcaacctcatccgcagcctcaccttcgcagcgcgatcagcatccgcagccgccaacagagacccatcacgagactcacctcgtagcacacacaacgaatcacctcaagagaattcgtccagagccaccccggatagaaccttacatggcacttcgttcgaagcggcatcgaatgggacttcacatggcacttcgttcgaagcatcgcgtggcactacgttcgagggaacctcctacagcagctccttcggtggaggctctgcgttcggagccctgagcggtggcactccgcaaggcgcccccttcggcgcttcgaatggaggcagcgcttcaccggtggctttccaagttgagagagcgccgttgggttcgccgcggttgaacgcccacgattcgagtcggtcaatgtcgccggccagctctgtggattcggagtcgtaccaagatcgggagcatcccttgcagcagttggccctggtcgtcaagcgaaatgatatgctcatgcccgcaccgccggagacagccgagaccaactcttctgataagacgttgatacactgtccactttgcaattacaccacaaattcaagatctacattcaacgcacatcttcacgcacacgaaggccaaaaatgttgctacatctgtgaactaatgactgagtcagtagaagagttgcggcaacactaccaaaacgttcatgacgtcaacgtttcagcggacttcctgaaccatagctcgggtggagaagaggagcaaggaattacagtaccaaagctaaattctcaaggtaaggtgaagaagcatcggtgcaagcaatgtgggatcgtctgcgtgacgaaactggaattctgggagcactgccgcgggcacatcaagcaggagcgactcctgacctgccccaagtgcccgttcgtgaccgagtacaagcaccacctcgagtaccacctgcgcaaccacttcggctcgaagcccttcaagtgcacgcagtgctcctactcgtgcgtcaacaagtccatgctcaactcccacctcaagtcccactcgaacgtctaccagttccgctgcaacgactgcagctacgccaccaagtactgccacagcctcaaactccacctccgcaagtacaagcacgcgccggccatggtcctcaacccggacggctccccgaaccccctccccatcgtcgacgtctacgggacccgtcgcggacccaagcagagaccaaagaagcacgagagtccaaagaagatccaaacgacgcagtactcaaaccaaacggcgttccccaatcaaacgcccccctcgagtcagatgacctactccagtccggcgttccccacccaacccaagttcctgtcgacccagacacacttcccaccgagtcagttcctttccgttccgccgtcagttccgacgatcctcacgcccaactcctactcccccacccgatcgaccctgtcacccgcccctctctcgccggtccaaccgcggctcgctagtcaaaccctgtcccctagtcagagacaatctcctaatccacccctctcgtccccgcagacgtcacccacccaattcccgaaccctgcgttctcgagtcaaccctactccatgttccctgcgaactacgggctctacccgccgttctacccgctcgtgccgaactttccactctcgtcgctcccgcttcttcagctggacattccggcgcttctggaggaggccaagcggtctacggagacgctgaataagctcaaggagttgctccagtcgaacaacaacaacagtcagtacatctccaaagcggtcgcacagcagatcatcgacgaggcgagttgtccctcgacaccagcgagtgacgtcaactcggctccgttggacttgagtaaatcatcgggcaatgatggtaatacgagtgcgtctgcaggctcaaaccgacgtaaaggcaaggctgtaaagagggtgccggtgcactccatgtattacgatgatagcgatggtgaaaggtctccagttaagttcagcgcgcccggaatgctgcccggcgcacaaaagatttactga

SEQ ID NO: 71 - RNA, 1455 nt, Bemisia tabaci
  source 1..1455: mol_type = mRNA
atgcttatacccagatgtcatctccggcagtactatgctgctgctatcgcctcgctctcggcgatgatgactggggcagcaatgggatggccctcgccggtactggagcacttctgtgaaggcgcccactgcgaggtgaggatgacggcgggcgaggcctcctgggtgctctccctcatcgagatcgggaacctcttctcgccgatcccttgcggttacctcgtggacatgtacgggcggcagccgtgtctcttcgccaccgggccgctcttcctcggctcttggaccctcatcatctgctcccgctcggtgggctacctctacctggcgcggctcgtccagggcctcggcatgggcatcgtctacacggtcacccccatgtacatctcggagatcgccggcgccgacgtccgcggccgcctcagcatcctcttcgtcggcctcctcaacttgggcatcctcctcgagtacatcgtcggccccttcgtcagctaccggacgctcggctacatctccatctccgtgcccatcctcttcatcgccacctccatctggctccccgagtccccgtacttcctcctcatgaacgacaagtccaaggaggccatcaacgccctgatgtggctccgctccgactactccaaggacaggatcttcgaggagctgaccctcatcaaagacgaggtcgagcaggagaaaggcacgaaaacggccgccaagaacaccttcggggacatattttcatcggcggccaaccggaaggcgttcttgatcgtccagatcgccgcctgcgctgacgtgctctccggcatgacggcgatcctggcctacgcctcggtcatcttcgcggcgccgcacaacacgacgatggaggcggaggactacccgatcatgttggggctcatcatgctcctggccatcttccctgccgcctacctggtggacatggccggtcggaggccgctcctcatattctcgtgcctcttctctgggcttttcgaactcgtggctgccttctacttctacgcggccatgaagctggactgcgacgtggctcgcctcaagtggattccactcttggccatctgcgctttctctgtggcctactcgatgggtctgggctcgctggtgcccacgctcatgggcgagtgcttcccctctcaaatccgcggtcctgccagctccatgacgtccatcacgctctgcgccatctccttcctcgtcatcaagttcttccaggtggtcaacgaggagatcggcttgtattttaacttcttcatctacggcgtgagcagtatcgcgtgctcggccgtcttgtggcttgtccttcctgaaacgaagggcaagaccctgagcgagatccagcaggacctgaaagcctcttgcaagcccagtaaacctagtttgccgctttatgtaaacgcctcagtgcccaaaggtgtcgaggcttcgtaa

SEQ ID NO: 72 - RNA, 2895 nt, Bemisia tabaci
  source 1..2895: mol_type = mRNA
atggcaaatagcgttgaacagccgtgctacaccttgatcagtcttccatcagactcagagtttcccaatgaaatgcaactaaagtcagatctcgaaaagggagacttgcgaacaaagatcgaagccctgaagaaagttatctacatgatagcaaatggagaaagaatcccaggacttctgatggttattatccgctttgttcttcctcttgaggaccatacaatgaagaagttactccacattttttgggagatagttccaaaaacattgcctgatggcaaattgttgcaagagatgatattggtttgcgacgcatatcgtaaggatttacaacatccaaatgaatttgtcagaggctcaacgctacgatttttgtgtaagatgaaggagccagaattactggaacctcttatgccagcaatcagaacgtgccttgagcataggcactcttatgttcgtcgcaatgcagttttagccatttttacaatttaccggaattttgagtttttgattccggatgctccagagttgatcgctaattttcttgaaagtgagcaagacatgtcatgcaaacgcaatgcttttctcatgcttctccatgctgatcaggaacgtgctcttacttttctggcatctagacttgatcaagtttcctcttttggtgatattcttcaacttgtcatcgttgaattaatctacaaagtttgtcatgcaaatcctggcgaaaggtctcgttttatacgatgcatttacaatcttctgaattcaaccagtcctgctgtacgctatgaagctgctggaacattagtaactctctcgagcgcgccaacagcaatcaaagctgcagcatcatgctacatagagttaattgtcaaagaaagtgacaataatgtaaaactgattgtacttgaccggttgattgtcttgaaggagcaccctgctcatgagcgtgttctgcaagatcttgtcatggacatcttgcgcgttttggccagccctgaccttgaagtacgcaaaaagacactgaatttggcaatggatttagtatcatcaagaaacattgaagagatggtgcttgtcttaaaaaaggaggttgccaaaacacataatgttattgaacatgaggacacgggaaaatatcgacagctacttgtgcggaccctccatacatgttgcataaagttcccggatgttgctgcaacagtcattcctgtcttggtcgagttcctttctgacacaaatgaattagctgccacagatgttttagtttttattcgtgaggctattcataaatttgacaatctgagacccctcataattgagcgtctccttgacacattttcaaccatcaagtccgaaagagttcaccgagcctcattatgggtccttggagagtacacgaacagcccagatgatattcaatcagtaatggctcaaatcaacaaggcattaggtgaagttccaatcgtagaagatgaaactcgcagagcagcaggtgaaaaaggtgaagaagtcgaacattccaaaattactagcagtggcacctccacccctaaacttgtcacctctgatggcacttatgcaactcagtctgcttttaacacaacaacaaatacaaaaaaagaagaacgcccaccacttcgccaatacttcatggatggaaactttttcatcggagcatctctcggaacaactctgaccaagctagcattgagatatattgagctggtacaagataaagtgaaacagaataaatttttgtcagaagctatgcttatcattgcttcaattttgcatcttggaaagtcgggcttgaccaccaaagcgattactaatgatgatgctgacaggctcttggtgagtctccgagtgctgtcagaaaaagccccacctatcgttggaatttacaccaaaaactgccggcaagccttagcatccatgcttgtcgccaaagcagaggaagaagcttcatcgcaaaaggccaaagagaaaccaggaaaccaagtccaaaccgatgaccccatcaactttatgcaattgtctaccacacgcggtggggaatttggagccactgaaaatgtttttgagttgagcctaacgcaagctgtagctggcaaccttagtgggtcttcgcaagatacacattcgcctctatctgcaagcaaactcaataaggtgacccagctgacaggattctcagaccctgtgtactcggaagcttatgttcacgtcaatcaatatgatattgttttggacgtcttgatcgtcaatcagacctcggatactctacagaactgtaccttagagcttgcaactttgggcgacttgaagttggttgagaaaccacagcctgtagtcttggcccctcatgatttttgcaatatcaaggcaaatgtgaaagtagcctccactgaaaatggcattatttttggaaatatagtatatgatgtcagcggtgcctcctcagatagaaacgtggttgtgctgaacgatattcacatagatatcatggactacattgttccagcctcctgtaatgatatcgagttccgagtgatgtgggcagaatttgagtgggagaataaactctcagtcaatactaacctgacagatctgcacgagtatttgcaccaccttataaagagcactaatatgaaatgcctaaccccggagaaagcattgtcagggcagtgcggtttcatggcagccaacatgtatgcccgctcgatcttcggagaagacgccctagcaaatctcagcatagagaaacccttcaacaaaccagatgcacctgtcactggtcacattcgaatccgtgcaaaaagtcagggtatggccttaagtcttggtgataagatcaacgcaacacagaaaagacctgtcaaagcttgttaa

SEQ ID NO: 73 - RNA, 1569 nt, Bemisia tabaci
  source 1..1569: mol_type = mRNA
atgtacaaaatcgcttttatatcagtcatttttagcttagtatttaactattatcatgctttgaacgtagatcacaagcagctcgattggtggcaacgagctgtattctatcaaatctatccgagatcgttcaaagacagcgatggtgacggaattggagatttaaaaggcatagctgagaaaatttggtatttgaaagatctgggcataacaggagtttggttcaacccagtcctagagtcacctggtctggatcttgggtacgatatttcaaacttcacgaacttagatcctctttttgggacgatggaggattttcagtacttgagagaagccctatacaaagcaggaattcacctctttctggatatcgttccaaaccacacgagtgaccagcatgactggttcttgaagtctgtgaaaaaaatagacccttatactaactactacatctggaaggacccaaaaatagtcaatggccagagacaaccgccaactaattggctcagtgagtttggaggctctacatggaaatggcatgaggagagaaatcaatactacttgcatcagttccattggaaacaaccagacttaaattacgattgcgaagagttggttcaagagatgatggacgtggtgaggttctggttggagcgcggagtggacggcatgaggttcgacgcggtggcctacttgttcgaagatcccgaatggcgagaccaagaattgctctcgcccgatctcgacccgacgaactactggaattacaaccggtcgcggacgatggaccaaccgaatacatatagattgataacaaggttcagggaggtcttcgatttctacacgaagaaagaggggaaaacaaaagtactaatgacagaagcatatacaactctcgatagaacaatggactattatcagtttgaggggaaaccaggagcccatatgccattcaatttctttttcatcacgcacgtgagcggtcgctctcccgccaaagattaccaaaaggcaatccagggttggatggacatggacggcgtgaacatgatcgggctttgcttgcccggtataggcaacacgtactacggcgacgagatcggcatggacgatacggtaatccgattcgatcagggtgtggatccgcaggcctgtcatggcggcccggagtggtacagccagaaatcgcgtgacccggccaggactcccttccagttttacgacgaacagaaaaacttggctcccagtcaattcgaatttctggcgtttgaatctgaaggcgcagatgcaagcaggcgcttggaaggaagtgaagcttacgttgtggtggttaatctgggaagtgactcacaatcaattgatcttttggcatttatgagtgatctaccagatgttctaacggttcacaccagcagcgtcaacagccagtatttaccgaacgataaggtatcaacgaatggatttttcctgcgcccaaaagcctctgttcttttaacaacggccaaagaggtaccacctcctgcttacaccgaccctgcaaatggaagttctacaatccacactatttag

SEQ ID NO: 74 - RNA, 666 nt, Bemisia tabaci
  source 1..666: mol_type = mRNA
atgagtttcctagcaaaagtgttcggtggtaaaaaggaggataaagctccctcaacaggggaagctattcaaaagttgagggaaactgaggaaatgttagtgaagaaacaggaatttttagagaaaaggattgaaaaagaaattcagactgccaaagctaatggatccaaaaacaaaagagctgctattcaggcgttgaagaggaagaagcggcttgagaaacagttacaacagatcgatggcacactgtctacaattgaaatgcaaagagaagcactggaaggtgccaataccaacacagctgtattaactaccatgaaaaatgctgcagatgcgctcaaagccgctcacaaacacatggatgttgatcaagtgcatgatatgatggatgacattgctgaacagcaagatgttgctaaggaaatctctgaggccatttcaaatccagtcgcatttggccatgacattgatgaagatgaattagagaaagaattagaagaactagaacaggaagaactagacaaagaacttctcggcactgggccttcaccagcactgccaattgtgccttctgcagagcctgctaaagtggcagataaatcaagtggcaagaagaaagaggaagatgatgatgatatgaaagaattgcagcagtgggcttcataa

SEQ ID NO: 75 - RNA, 324 nt, Bemisia tabaci
  source 1..324: mol_type = mRNA
atgggtcttggagactatcctctcgaatatgatcgaaaagtccatggaccttacgatccggctcgctactatggaaaaccggatacgtacttcagtgaagtgaaattaggagagctgggagcctggttcggccgacgcaacaagtctccttcagctgtggttggagctctcagtagagcatactggcgctggaatcgtagattcaaccactgtcgtattggtaacgctgcttacccgctccaagttataatcggaggagcaattattggatatttgatcaactaccccagaactcagaatcacatctataggaagtaccactaa

SEQ ID NO: 76 - RNA, 1383 nt, Bemisia tabaci
  source 1..1383: mol_type = mRNA
atgacccttttctctccgctgaatttcaagccttcgagtgtcaaacacctttatcagttgtcctctatagttcctgctccttctttattttcctattgtttagaaaatgttttaaggacaaaccctgattcatttctgagatgcttttgtgcggggccgatagcagtgtacgactcgaaagtgaatgagaaagaaattgaatataatgagcaacagaaaaaagtggcgacatcattacaaagagtgtatgaagaaattcaaagttactcacctcccaagaagggcttcttctcaaagattttcaaggagaaaagcagagctccgcaaggggtctacttgtatggcgcagtaggaggaggaaaaactatgttgatggatctattctactcttgtgtcaagatggagaagaaaaaaagaatacacttcaacgctttcatggtggatgttcacaaacgtattcatgaagtcaagaaaacggtggtcaaagatcccagggaaaccaagccaaaaccatttgatccaatccgcccagtagctctatctattagtaaagatgtttggttgatttgctttgatgaatttcaggtgacagacattggtgatgctatgattctgaaacggttgttcacagagctgtttgataatggggttgtgatgattgccaccagcaatagaccaccagacgatttgtataaaaatggtcttcaacgctcaaattttgttcctttcatccaagtacttaaagatcattgtgaagtggtcagtttagactcaggtgttgattaccgtagacgaactttggcaggcgctggcaagcattattttgttaaaaatcaagatgacgcagagaaagcagtagaaaacattttcaaacagttagtagccaacgagaatgatatcattcgaccaaaaactttaacgatattgggtcgtgatgttgtttttcagaaagtctgtggtcagattttaaattcaacgtttgcagaactctgtgatagaccgctggggtcaagtgattactgtatgttagctcaaattttccatactgtgattataaatgatgtgcctcagctgacgttgaaaaacaaatccttagttaggaggtttatcatgttaatggatacgctctatgacaatagggtgcgtgttgtgattactgctgatatacctttggatcaattgttcctaatgaaaaaatctgatggtattggtgaccatgaccgagttcttatggatgatctaaatatttcatcagaatccgaaaatgccgtagccagtatttttaccggtgatgaagaaatgtttgcttttgaccgcacagtgtcaagactgatagaaatgcagagcgaagaatattggaatcaatgggacaagcagcgctga

SEQ ID NO: 77 - RNA, 828 nt, Bemisia tabaci
  source 1..828: mol_type = mRNA
atgattaaggccatttcaagaggtggccaatttggtgctttttccaaagccaccgctcaagctattcctcctccttcagcatccgtgcttgtacctgctactttacctccttcatccaaaccccttgtggaaattgatcgttctttgctcacatctgactcattgggcaaagctgtatcttcaatcaacaacttcggagttatctccggtcctggagtgactactcaagtgagatttgctcacacagatgtcaaagttccagactttacagcttataggcgagactccaccaagagcccgacctctgacaatgacaagtctcttggttcccgagctgcattctcttatcttttcactgcaggtagtttggctggtgcaatttatggaggaaagggtattgttcacgcatttgtgacatctatgagtgcttctgctgatgtattagctgtttcaaccattgaagtaaagttgagtgcaattccagaagggcaatgtgttactttcaagtggagaggaaaaccgctgttcattcgccacagaacccaagaagaaatttctcgggagcgagcagttccactcagtgacttacgtgatcctcaggaggatgaagttagagtccagaaacctgagtggcttgtagttctcggtgtatgcacccatttgggttgtgtacctattgccaatgctggtgattttggaggttactactgtccatgccatggttctcattatgacgcatccggcagaatccgcaaaggcccagctccattgaacttagaggttccaaagtacgctttcactgacccagacacggttcttgttgggtaa

SEQ ID NO: 78 - RNA, 1275 nt, Bemisia tabaci
  source 1..1275: mol_type = mRNA
atggacccagcgaaaagtagaacgtttgagtatcctgatttttggactgatgccgagcgaatgaacgcattgtatgctccttttcggaatcgcaatgtcaaccctctcaactttgacacaaaactggacttttggaagaagatgatcgaaaaatggtgtttatttcagtcaaacccactcttcagtatcaaagatatccaaaccttcttccaacgggacacacggagacccctctgtttggcgcttgttgtagatgacttgttgaagaataaagaaataaagtcggtagatgaattcttgcaagagacacccccagaacaatcatggagtggttgggcggtgcattctttggtgaaaagtcctgcaagatgggcattcaccaagttaaaaactaatgtatttgcctccaattcaacagttcaggaagacactgagtttgtccatctgccatctttgaaggtgcttgctgaaaatatcctcaagtccgtcgaatttgatcatctctacgacatagaagagttgaaagatgtaatgaagaatgagcaaccattttctttgactattgtcaatttgatcgttcactacttatcactgcagagtaaagcaataaaaaccgttttagatggcaaaactctagtcaaatttgtaagtgacaaaggtggccagagcttgactatttcaaaggaggaggaggcaacatacaccctgcaatctcaagaacgcttcctaatagagaatattgaacagcttgagatggaaaaagaaaatttagtgaaagaagctaaaagttaccttgatagaggtttaagaaaattagctaaagtgcatctgagaaaaaaaatggagctagagaaaaccatcgagaaaagagtattaatactggaaaatattcaaagcttgatgagcagagtgaaagaagtagattctaacagtcaggtgttcgatacttaccagcaaggcgtcttcgcgttggaatccaaaattaaagaagctggtctcaacatcgataaaattgacgatacaatgggcaaaattgaacaggctctagaagacaatgacgaaatcgagtctacactgtctaaagtcataaactcgccgtcagatgctgaatatgaggctgaattagcggctcttttgctagatgaattagcgccagttcctgatcatagtccaacccatctaccatcttctctaataggaaatcaagttgaggatatgggcacatcagaggtagcacacaagccgaaaaaagttgcagctgaagcaactggatga

SEQ ID NO: 79 - RNA, 1737 nt, Bemisia tabaci
  source 1..1737: mol_type = mRNA
atggtagttgttctaagggaagcgggagttcctgctgttcttagtgggacacctcctcattgcaaaactggaatccctcgacatactgattgggacataaatgactctactatcccaagggtggtggagtacaatgggtgggaggagtgggcggacggtcactgtcggctggtgtaccgggccaactgcgaagaagcgcggcggcatgcgtccggctgggccatgcgcaacaccaacaaccacaacgcgcagattctcaagaagtcctgcctgggcgttctcgtttgctcccgacgttgcgttctccccaacggagactccgttcacctaaggcctgccatctgcgacaaggcccgcaaaaaacaacaagggaagccttgcccgaatcgacaatgcactggtcgattagaaattttagcgtgtagaggtcattgcggatatccagtgacacatttttggaggcatactgaccatgcaatattttttcaggcaaaaggtgtccatgatcatttgagacctgaagccaaatctacctcagaagctaggcggaccttgggagccggcagaagagttagaaatctagccgttctcctagctcgtgatgctgcacttagctcaaaattattatcagtcaaggatagagaccgtaatagatgtgagatagaacgtttgcgcattcctcagcctcccccggtttcggacagtgaaaaagtgtactcctgctcttgtcctcctttcgaatgcgtgtgtcaaagccgattccagtctttcaactggcaccagtcaaaccaggaaacctactggatgtcagaaaacgttcaaccggttccaaatcaaatcatcgagagtgacaccaataactacttgcctgagagcaacgccaccaacctcaacaccagcagcaacaatagcaataacaacaacaacaacaacaacaccaacaacaacaacaacaacaacaacaacaacaacaacaacaacaacactgttccctacgatttcccgcctttcggtaacgatttattcccggcagacgagctgttccaactggagcagccaatgcgagcgagctacagaggagcaccagaggaagacaaatgttcgccgacggtgctggacctcggtagcggaaccatccatcggacgacgttcaagtcggaaccggacgccgagccgtactggctcaccgcggccaccccttccgtccacaccgacgacagcaactgcagccagatgaagcagttctcgccgaatcacagctatatgaccaacttggccgataccgacgtggacgactcgagcgagatgagcacgcaccacctctcgccgggcgcgcagccgccgaaaagcgggacgaatttccatctgctcaacgccgaggagatccctttccagtacgtgagctgcgattcgtacaggatggaccaatgcgtgaatcagtacaggtcttgcgatgctcccgaagagttcaattttgcttgtacgatggatgcttctgtccaatatcccagtgagcaactgacgagtctggattcgacgatgatgacgacgtatcctgcgcgtacgggttacggtcagccgacgcatgatctcatggtacaaacccctcactcctgtgatgagttcatttcgctggccgatttcaggcttcctcagccgtcgacggtactccatcatgagacttacttgccatccaacgctcactcttgtcagacgcctggttattgtcatcagtga

SEQ ID NO: 80 - RNA, 834 nt, Bemisia tabaci
  source 1..834: mol_type = mRNA
atggtttatagtgcaatggatcaagttgtgccaaatgaatacctccggaaggctgaggattttgctgacttggtttataagaagacaaaagtattccttccaactgcttcaagactgtgtctcatctcaactttcatcgaagatggtttgcgaatgtacttccagtggacacagcaaaaggagtatatggacatgtcatggggttgtggcagctttctagcaactctttttgtattcatcaatctagttggtcaattaggaggctgtgttttggttatagttcagaagcaagtccctgctgcgtgtggtgtgctctttttcatcgtagttttacagacttttgcgtatgatattctctgggatctgcatttcctattgcgtaatctagctttaattggtgctctactcctcgttctggctgacagcaaagctgaaacaaggacattgctggctggtgttccaacattagatacgaataaacctaaaaattatctccagcttggaggaagaattcttttggctttcatgttcattaccctaattagattagaaatctcatttttccaaattttgcaagacttatttagctctgcattaatgattttagtaatgattggctataaaacaaagctaagtgctttgctgctggttgggttcttatcattcctcaacttttatcataatgcttggtggaatgttccatcttacaaacctctccgagatttcctaaagtacgactttttccagacgttttctgtggttggtggtttgttaatgatagtgctacgtggtccgggtggtgtgtcaatggatgaacacaagaaagattggtag

SEQ ID NO: 81 - RNA, 1668 nt, Bemisia tabaci
  source 1..1668: mol_type = mRNA
atgcatttcgctcaatctcacagcctgcttcgctgtaaatgtcaacaattttttccttcttgtagaaattttttgaaaactcgaatttttgataaaaataactcttttgccaatgttaccgaaggactcaaacatctgtacaaaacaaaattgttaccactggaggagaaatatttctttcacgatttttatctccctaaaatcacagatcaagattttgatgctaagcctatgattttgttaatgggacagtattccaccggtaaaactacacttatcaaatatctcatcaatggggattttcccggaatgaggattggcccagagcccaccactgataaattcatcgttgtcatgcatggagagaaagaaggttatatccccggcaatgctttagtcgcagattcatcaaaacctttcacaccattgtccagttttggaaatagttttcttaatagattgcaatgctctttatcaagttcgccgagacttggtgaaatttcattcatcgatacacctggtattttgtctggagaaaagcaacgcattgacaggggctatgattttaccggagtcctggaatggtttgcagagcgagttgatcgtatcatccttttatttgatgcaaataaattagatatatccgatgaatttcgacgatcaattgaaattttaaaagtgcatgatgagaagataagaattgttttaaacaaagcagatagaattggtcatcaagaactgctgcgagtgtatggagcgttgatgtggtcccttggaaaagtactaagaactcctgaagtatcacgagtctacgtcggttcattctgggatcagcctctgcagaatgatatgttcagaaagttgtttgaggatgaagaaatggatctcatgaaagatattcagtcgctacctagaaataacaccttacgaaaactaaatgacataagtaaacgagcaaggcttgccaaaactcaggcttatttaattgcagaattgggtggacaaatgccaaccttcaacattttctcgaataaagccgcaattcaagaaaatttaatcgacaatttggcaagtatgttccaaacaattcaaggtcgatatcgtctgtcaccaggtgattttcctcaattagaaaaagctcaggagaagttgagagcatatgatttttccaagtttccgtcccttaatgaagatctcatcaatgctgttgatgaaatgatgatgaaagatctacctcaaatcatgtccaacatacctgctgaggagagcaaacaaaatgagttcctaacaagtgctggtctagaaaatacaccttttggttatgatcaaggcgttggtatcaatgaaggcaaaagcgaacgtggatgggtcgtcgaaaaatatagacaaaaatatgacagtatttatgactctttagctcacaatgataacaagattgttgtatcagttgcacgtgaagaaatgatgaaatcaaaactaccaagcaatgtcctgggcaaaatttggaatttggctgatgttgacggagatggtgttcttgatagggatgaatttgccttgtcaatgcatttaatagacatcaaattgaaaggtcatgagctgcctgacaagcttccagagcatctaataccaccgtcaaagaagaaccatgctccaagtagaccctag

SEQ ID NO: 82 - RNA, 2193 nt, Bemisia tabaci
  source 1..2193: mol_type = mRNA
atgacagaagacaaaccggataaggacaagaccgagaaaacggaagtggaatggggaagtgaaaaactatgccaagcgcaggcagcgatcaatgaaaatccttgggatattgaatcttggggtattttgatacgagaagcccaaaccagatggattcatgatgtacgccctttctttgagcaacttgtcaacacttttccaacaaccgggcgttactggaaaatttacattgaacaagagatgagaggcagaaattttgaaaaagttgaaaagctttttcaaagatgcctaatcaaggttttgaacatcgatctgtggaagctatatctcgattatgtcaaaggaacaaaagcaagtttagcaacttacaaagaaaaaatggctcaagcgtatgattttgcccttgataaaataggaatggatatcaactcctttgatatttggaatgattacgtaaactttctcaaaagtgtagaagccattggatcttatgctgagaaccaaaaaattactgcttgtaggaaggtttaccaacgaggagttgtgaatccgatgaataaaattgaagcattgtggaaggattacatagcttacgaacaagtcatcaaccctatcatagctgaaaaaatgatgatggagcgaagcagagattacatgaacgcacggcgagttgccaaggaattcgaagctatcactaagggtctcaatagaaatttgccaagcgttccaccaactggtcacatagaagagttgaaacaggtagaactgtggaagaaatatatcgcatgggaaaaatcaaatccgttgcgttcagaagacactgccttagttacacgcagggtcatgtttgccttcgagcaatgtttgctgtgcatgggacaccatccagatgtgtggtatgaagcagctcagtatttagaccaaagttccaaaacactctccgagaaaggggatgtgaatgcatcaaaactatttagcgatgaagctgcaacaatttttgaccgagcaacatcaactattttaaagcatagtatgctcctccactttgcgtatgccgattttgaggaaggcaggatgaagtatgagaaagtgcatgaaatttacaaaacgtatctggaactgcaggaaatagatcctactcttacttatgtgcagtatatgaaatttgctagaagagcagaaggaattaagtcagccagatcggtgtttcggaaagcaagggaggacccccgttccaattaccagattttcgtggcagcagccttgatggagtattattgtagtaaagataaaaatattgcatttaggatttttgaattaggactgaaaaagttctctcacacgccagaatacctgttgtgttacatagactacttatcacatttgaacgaagataacaacacacgagtgctctttgaacgtgtcctctcatcgggtagtcttgagtctgaaaaatctgttgaaatttggaataggttcttagaattcgagtccaacataggtgatttaagtagtattgtaaaagttgaaaaaagaaggagtgctgttttgagtaagattgcagagttcgaaggtaaagaaaccgcccagttggttgataggtacaagttcctgaacctgttcccttgcacccctgcagagttaaaagcaataggctacaatgaagtcactcaaaatatagccaagtcattccaagctgccaagtctggcgggccgatcatctccagcctggacgtgatggatgacggagatgcagctcagagaaatctcccgaagccagacgtatcacaaatgattccatataagcctaaacgaaatgcattcatcggtgaacatcctatcccaggtggcagcttccctccacctcctgccgttgctcaactaatggccactttgccaccccctggttgttttcatggaccatttgttgctgtggatcagcttctggagatatttgataaaatccaaattccagataaacctcctgttccaaaaggtgacaacggttgtgatactcggttatttgacttcaccagctctatccactggatggagaacgatgattcagtcttaaacagtgggatcaggaggaaacggaaagcaggaggaggggatgaaagtgatgaagaagaaaacgtcgctccacctgtctacgacatttatagaataagacagcaaaaacgagtcaaatga

SEQ ID NO: 83 - RNA, 1761 nt, Bemisia tabaci
  source 1..1761: mol_type = mRNA
atggctttgaaaacgctcgtcgggcaaaaaattatgaatgaagctatcaagcagaagaagaagactgggaaagatgttgagtggcgggtgctagtggtcgaccagctcgccatgaggatggtctcagcttgctgtaaaatgcatgaaatctctgctgaaggaatcaccattgtagaagatttaaataagaagcgggagcctctaccaacaatggaagcagtttacctaattagtccttgcgagaaatcagtgcatgccctgatgaatgattttaattatggtagccgtactatgtacaaagctgctcatgtttacttcactgaagcttgccaagaagagcgctttaacaaactttgccatgccccagttgccaaatatattaaaacatgtaaagaaattaatattgcatttatcgcgtatgagcagaaggtgttctcacttgatactccagaaacattccagtgcttttacaatcctgcatattccagcaaccgcaatgccaatatggaacgtattgcagagcaaatcgcaacattatgtgcaactttgggcgagtatccctcagtaagatatcgcagtgactttgacaagaatttggaattggcgcatgtgatccagcagaaattagatgcatacaaagctgacgaaccaacgatgggggaggggccagagaaagctcgctctcagctcttgattctagacagaggctttgattgcgtttcaccggttctccatgagcttactcttcaagctatggcctacgatttgttgccaattgaaaatgacgtttacaagtatgaagctaccgctggggctccagagaaagaagttcttctggatgaaaatgatgagttgtgggttgaattgagacaccaacatattgctgttgtctctcagaatgttaccaaaaatctcaagaagtttatcgactcaaaacgaatgccccaaggagacaagcaatcaatgcgtgacctctcacaaatgatcaagaaaatgcctcagtatcagaaagagctgagtaaatattcaactcacttgcatcttgctgaggattgtatgaaggcataccaaggatatgtcgataaattgtgcaaagtagaacaggatctagccatgggcacagatgctgaaggtgagcgcatcaaggatcatatgagaaacattgtgcctgttcttctcgacaaagctgtgtcaaattatgataagttgaggattattattctgtacatcttatcgaagaatggaatatcagaagagaatttgaataaacttattcagcacacgcaaatttcaccgcaagaaaaacaggccattgtaaatctagccaatctgggagtcaacgttgtaacagatggtgggcgcaaagtaaaagtctaccaaccacctcgcaaagaacggattactgagcagacctaccagatgtctcgttggacaccagtcgtcaaggacttgatggaagattgcattgaggataagttagacctgaaacattttccattccttggtggccgcgcagcctcctctggctaccatgcacctaccagtgccagatatggacattggcacaaggacaaaggacaacagacggtgaaaaacgttccacgcctaatagttttcattgttggaggtgtctcatattctgagatccgatgtgcatatgaagtcaccaatgccatcaagacatgggaagtcatcataggatcctctcacatactaacgcccgaagatttcctaaacaaccttgcaaatctcagtgcataa

SEQ ID NO: 84 - RNA, 1470 nt, Bemisia tabaci
  source 1..1470: mol_type = mRNA
atgtctccaaccaagcagtcacaattgaacatacattttcgcgtcacaaggagtggcactccaaaaggcaaacgcaacaaagagaatgacaatactccttgtaagaaaccagccccagtcgctaccccctacaagttaacctccgaagcagaaaattacgtccacattgacacccctcggccaccgaaaaggccctactcttcatcaaagcagactgctgaagacatttcaccacccaaagaaaatggatttaaattggcccgcaaagtccttcatggaagtgccacatcatccttacctgggcgagacaaggaactaaatgaaatgagatcatttttggaatcccatttagaaaatgagacctccggagcaatgtatgtttctggccaacctgggacaggaaaaactgcatgcctcacacatctgttgacagaagaaaagataaagtcaaatttcaaaattgtgtcggtgaattgttcctacatgcagtctgcagttgcgatttatggtaggatatgtgaagaactttctctgaaagtttccggcagatctgaaaaagaatatttgacgaagattcggaagtacctgatcagtgaacataaaatgattctattgatacttgacgaaatcgatcaattggagaccaagaagcagaacgttttgtactcaatttttgaatggccctcattaccggatgccaagctggtcttagttggtatagccaatgccttagatttaactgaccgagttttgccacgactgcaagccaagcttgaaaagcaaccgcagctgcttcactttgcaccgtacacaaaacaacagattattgatatcatttgcgaaagatttaaagagggtaatatctcatatttatttgatgacaatgctttaaatttactcgcggccaaagtagcagcagtctcaggtgatgtgcgtaaagcattggatgttgctagatgcgcagtagatttagctgagaacaaatccaaaagctctgttttacaaccaagctctaacaatgtttcaagcagcagcgttgcttcccttgacaaaattgaattaaaagaagtcctgacgaccatcaattccgtttacggaacgagtcaagttttgaacgctgtgactggttcgcaaccatctctacctcttcagcaacagttgatagtttgttctctccttctcatgatggaccatgaaaccaagaaactggacatcacattaggaaagttgtatgatgtgttccgcaaagtctgctcaaagcaaaggcttggtggtgtcgatttatccgagttcatctccctttgcgatcttgttcaagcccgaggaatccttaaaattcacagcaaaactcgtaatcgacagtcaaaggtaagcttgcagtgggacaaggaagaactgatggcaattttacaagataagacgctgctatcagatatcctagcagataagaaagtcctgtatgataagtaa

SEQ ID NO: 85 - RNA, 1935 nt, Bemisia tabaci
  source 1..1935: mol_type = mRNA
atggcctatagtgttaatatttctgtggaggccccaattgaaagccaaattcaagaaatcacctacgatggacaagaaatataccaggcgcctctctcaatgtcagagaatctggcgaaaatggcgcaaaaaattgattttgctcgtgttagtcctgacaccttcaaaagtgaaccaatggaaacagacaaacctgatgacgatgcacagtctaaagattctgccgcttttcaagctcctcaatgtctctgggactctgtgagaagtaaattaaggaattcacttacagagttgtgtgttttacaagatgtgttgaccatcgccaaagaaaaacgctatatggtcctggatccagtacctcaagaagttccagaacagaaaccaatggctcaaatctatgcaaggaaaaaagctttatcaggagcagcgtccgtcttactcagtgccgctgaaagattgagaacctctcaaacagaaatggctcgtaacaggacaaccccagatttccacatagagttattacgactgagacaaaattggcgattgaagaaagtttccaatgctataattggagatcttagttacagaactgcgggatcaaaattttctcagatgggtatgtttgaagtaacaaaagcagaagatgatgcctcaacatcgcaagcctccagtcctcctccatcacctggacttgggccaccaatgccaccaaaaccaccttcagccctcagagtcacagttccatcagaattacagggagtggcatatattatggtattatgtcgaaaagatcaagaagatttaagtgtatctgctaatcttctgggctcgtctgcaccaagtgcaaatccagatgttcattggcagcaaaaacttgaagcagctcagaatgtattgttctgtaaagaactttttaatcaattagccaaagaagccgttcaactccagggtcccattccacatatggttgttggaaatcaaatcatggccactgtccttccgggaattcagctgatcatcggattgtgtcatagtggaggcggtggagaatctaaaagaggaatcgcccctcctccgccaaaaggtgatcatgatcatgtgctggaacattctcttcatcaacttcttagagaggtgcaccacaaaaatactcatcatccgttcccgcatccctccagtgggcccctgggacccagcaagaagagagcattggcaggaccaactgctgcggaccggtaccagctgttagagatgaccaaaagtaaaaccatgcttgaagaaatgatcgagcagactcaacatttcttcatgagactgcgagcagaatatgtattagatacaattgcgaaagaggtaaaagaccctctcattgtctcgcactggaatgcgttaaattctccaacccagtcttgtgtgaaaatcaccatcatcactcatggatatgaagtcattggcaaatcctctcttattgttcatgtcggtcaaaaatccatgaagtgtgtttgcagagatgggaaagtgatgcatttatcctacgagccacaagagttgcgggacctgattttctgccagattcatcaacaccaaataaattctgtacaagctcttggaaggtgtatgggatggcagcaccttgcgaacagcccccatttaggaattggacctgtcgaacccctaggcaacgccagttcttgcatcctagcctctccaatgggtgacaggattattgccattcgttgtgcaccacaagcgggacctcaagttttcattgctcactcgccgcgaaaagatttcttcagtggacagctagtcaaagagcgcaaatgggaaaacttaggtgggcctttcaaagaggttcgttgggacaaaatggaagggaaaaatttcctgaacaaaatggaactgctcatggctagtttaactagcaactcctaa

SEQ ID NO: 86 - RNA, 5058 nt, Bemisia tabaci
  source 1..5058: mol_type = mRNA
atgccagctgaagagaaaacatcaggcaaaaagctgtctaacaaagaaaagaagaagttgaaactagaggaggaatttgaaactaagccagcaaagtcgaagaaaggccggaaacatgatgactcagactctgaagtagaaacgtctcagaaaccagcagtgaatgatgatgaagaaagtcaagcatcgggcaaacctcagaagaagttatctgccaaagaaaagaggaaattgaagaaagggcaaatggatgatttcaatgactctgattcgatatcttcttctctatctggagttcagaaagctaaaaaattgtctgcaaaagataagaaaaagttgaaagatgaagaaggattcaggagtaaggagcataaaccaaccaaaggaaagaaaagagatgatgatagtgactcagactcaaacgtcaaaaaatctaagtcaggaaaatcaggtaatgtttttgcatcttttattgagtcagatgaagatgagcctgttgcaagcttagctcccaaaaagtccagtgccaaagaaaaaaagaaaattgagaagaagaagaaaaagctagaaagtgacgatgaaagtgatgattttagcatcagtaaaaaagattccgatgaagattcaagcgcaacggaccgcataggaaaaatacccaaaaaactaacagcgaaagagaagaaaaagttggaaaagaaaaagaagttggaagaaagtgctgatgaaagtgatgatatagatgtcattaaaaaagagaattctaagaaaatagaagagtctgatgaggattctgatgattcaaaaccctcgctcaaaaaactatctgccaaagaaaagaaaaagttagaaaagaagaagaaacaagcagtaagtgatgatgatagtgatgatttggatatcattaaaaaagaaaaaactaagaaagtggaagagcctgatgaggactcagatgcctcaaaacctgtacttaaaaaactatccgctaaagaaaagaaaaagttagaaaagaagaagaaacaagcagtaagtgatgatgatagtgatgtagatatcattaaacaagaaactgcaaagaaagcatcggactctgacaatgaagcttccactaatgcagcgcctaaaaaactcacagcaaaagaaagaaggaaactggagcggaaaaagggatgggaagaagaggaagaagaacaggatgaggatgtaacaaaacccaaagaagagaaaaaagtagaggatgtcgcagaagagaaaggtggtaaaaaactcaatgccaaggaaagaagaaagatggagcgacagaaacaatgggatgaactcggtgaagagaaaaaagatgttgaaaatgttgaagataaagctgagtccaaacctgttgaagtgattgaagcagcaattgaaaatctgcagataactaaaggaaaacagaaagagaaaaagaagaaaaaagacggtggtaaagagaacgaacctgatgcagagttaagtagcaaagaatccattaaaaaggatgaaaaagttgagagtaaaacggtgaatgatgttgatgcattgagtgcaagtttagatagtatgcagctgaaagctaaggaacccaagaaactgtccgccaaagagaagaaaaaactagaaaagaaagagaaaattgaagcagatttcaaacggcagatgggattacttgacaccgaagaaggggagaagaaaaatgatgatgaaaaattagaaatcaaggaagatgcgaaaaaagttgaaggtagtgaagcagatgtaaatgaagaaaaagttgaaaaatctaaagaaaagaaaaagagtaaaaaagaagtgaagttcagtgagccccaagaagaccataaagatgaaatagctgaagaggaagcttccaaagacgaatctgttcctgaaatttcagaggaaaaaggagagaaggagaagaaactcacacacaaagagaaaaagaagctgaaaaaagaaatggaatatcaaaaaatgatggagttaacaacaaagaagggtggacaaggtcatagtgagttagactcaaactttgctgtctcccaatccttaaaatcagctaaccaattagcagcacttgagaatgctgtagatatcaaaattgaaaactttagcatatcggccaagggaaaagacttgttcacaaatgcaacgcttttaattgctgcaggccgcaggtacggtttagttggacccaatggacatggtaaaacaacattactcaggcatcttgcgactcgagcttttgcaattccgccaaacattgatattctttattgtgagcaggaagtcattgccgatgatacattagcatatgaagctgtattaaaagcagatgtcaaacgaacagaacttctgaaggaatgtaaagagctggaagaaaaaattgagaaaggagatttggaagcacaagaaaggctaaatgaagtatatgaagaattaaaagcaattggtgcggattcagcagagccacgagcacgcagaattctagctggtttaggattttcacgagccatgcaggatcgtccgaccaacagtttttcgggaggttggcgaatgcgtgtctctttagctagagctttgtttgtagaaccaactcttttgttacttgatgaacctacaaatcacttagatcttaatgctgtaatttggctggacaactacttacagggctggaagaaaacactcttagttgtctctcacgaccaaagtttcttagataatgtttgtaatgaaattattcacctagacatgcaaaaactattctactacaaaggaaattacacaatgttcaaaaaaatgtttgcgcaaaagcggaaagaactaattaaagagtacgaaaaacaagaaaagcgtatcaaggacttgaaagctcatggtcagtccaagaaagctgcagaaaagaaacagaaagaggcgctcacgaggaaacaagagaaaaatcgtagcaaagcaccgaaagcagacgacgaagacaaacccacagaattgttgcagaaaccaagggaatacatcgttaaattttccttcccagatcctcctcctctccaaccacctattcttggtctttacaacgtaacttttgcgtatcccggccaaaaaccactcttcattaattgtgatttcggtattgaccttagttctcgtgttgctatcgtaggtcctaatggagttggtaaatctacgtttttgaaacttcttaccggtgatttggagccaacaaaaggtgaagtcaaaagaaatcaccggcttcgaattggaaggtttgaccaacacagtggagaacatttaacagctgaagagacccctagtgaatatttgatgcggctatttgatttgcagtacgaaaaggcgcgcaaagctctaggaacgtttggtctggcgtcacatgctcacacaatcaaaatgaaagacctttcaggagggcaaaaagcacgagtagctatggccgaactgtgtctaatggctccagatgttataattttggatgaaccaacgaacaatttagatattgagtccatcgatgctctggcagaagcaattaacgagtataatggaggagttattatcgtttctcacgacgaacgtttgatccgagaaacagaatgttctctatgggtcattgaggatcagacgatcaatgaagtcgatggagacttcgatgactacaggaaggagctgttggacagtttgggtgaagtcatcaacaatcctagtatcattgccaacgcagctgttgaacatcatactccgaataaggcagtaggattgaaatcgaatcaaatatatcatgttcgttttctgagctcagataacctcaatggtaacgatactccagatggattactcgttagctttcgagaggaatggcagaaagagctggagctcaattcaaatccaccctcaaaaggatctaaaaaattagaagagaagttagataacttcagcaacttggaagatgaagcaaaaacactatttttgaaaggtgctgaaaatgagcgagcaggcaaacattatgaagccattcaattctacaaaagagctgttcaacttgttccagacatagaattcagaatttataacagtaacaaaactgtccagttcagatcaactgaaacagatgatgaagatgaaccagaaaaccaatcaaatttgggtgaagactccttgcctgtagaggatgttattcttctggttcagagggaaatggccaaagaccaaaactattcatgtttacctgagaatgtacaaactgatactcacatctcagcactgccctttgaaattctcttgtacatatttcgatgggttgtctctcgggatcttgatctccggtccctggaatcatgtgcgctagtgtgccgtagtttctacctctgtgctcgtgatgaagagctgtggaagtctgcttgccaacaaatgtggggcttgaaagtgcaacctttgcaaagtccgaaacacaatcgctggcggcgcacttttgtggaaagtcctttcattaaaacatctggttgttacattagcaaaacatcctatattcgtcacggtgaaaactcatttcaagaccagtcatatcgaccatggcatctggtgacatattatagatatttaaggttttttggcggtggtcaggtcttaatgttgtgcactccaatagagcctgctcaaacagtgggacaacttcgccgccgatcctgctcaaataattcagtgctatcaggtcattatcttatctcagatgatgttgttacggttgtatttcatcaaaccacaaccacgcctatttctatttttggcagtaaaaatagaaaaagcaaaaatgttccaaaagaaacaacggactcagctttccacatggagttccaaatcctcaactacaaatctcgtctgaatgttcaacttgtctggcggcggtacgctctctatcagaagaaaggcaacaatcctgaaatacaatcaacatttgacttggcccattctagattccctccgctctggtactccagggtcaaaagctacacaactgagtctgaagttcctctgttatga

SEQ ID NO: 87 - RNA, 867 nt, Bemisia tabaci
  source 1..867: mol_type = mRNA
atggcctcagtattattgaacgatgctgagaaaactttcattcttcatggtgttgaggtggatttacgatgtgatgggcgcagaagaggtgattatcgaccaatggaattagagactgatgtcgtcagcactgccagtggctctgcacgtttgcgtctagcgaacactgatattcttgttggtgtcaaaacagagattgatgttccgtatccagagaatcccgaggaaggaaaactcgagttttttgttgactgctctgccaatgcaactccagcattcgaaggtcgtggtggtgaagatttagcaaatgaaatcagcagtagattgagccgtgcataccagtctttacctcttgctcctctgtgtatcgtaccaaaacaagcgtgctggaaactctacgttgacatccttattttagagtgtggtggcaatttttacgatgctatctccttggcggtcaaagcagcactattcaacactcgtgtgccgcaggtcaccggttcatttttagatggaggtagtgttgatctagaagtttccgatgatccattccaatgttggaggcttgatataacaaaagcacctgtccttgtgactcttagtaagattggagacaattgtgttgtggatccaactgcagaagaggaaacatgcagtgtggcaagcatcgttgttgccgttttggattcaggctctctcactgcagtcattaaaataggagaaggcagtgttcatgaacaaacactaattgagactatcaaaactgctcagaaaatcggcgttgaactgaactcaagtctgatgacagcattaaatcaagaagaaagtctagggccaaaaagacagagattcgggtttttaaaatga

SEQ ID NO: 88 - RNA, 4923 nt, Bemisia sp.
  source 1..4923: mol_type = mRNA
atgagcatcatggaaatggctaatacaagctcccattgggatgacaccctctcgaatatgtcatcatgctcttcgtcactggaggaatcgacaacctcctcaacatatacgtcgacctcagacgaaggcgaggactatggtgtcaaaatggaagagtgcgatttggaaggagtccgtcttcttcttccacaggagctgtgcgaagacccagcaatattcaaggagatgtttaatgctgggttgtggaagtcgttaagtgaagaaaacaagaggcatttattgaactttttcccatcgttcccgcaaaatgacatgcaagaaaaatcaaaaaccctgcaaaaactcttaagcggtgaagccttccagtttggtgtcaacccgttaacggacttccatgaaaaactaagggccgggaatttcagtcctgatatcgccagagttcgagctttgctcaaacgggcacagtacaaggactacaaacaaagtcagagacgctactactttcaactaatgaaaaatattttactgtctcgacatcggttactctctgcggcagccagtttgcccccaggtgccccccttccacggttgcagccggtcggcccagcctcctcctcttcaacttcctctcctatataccaaaaggtccgccacaggtatttcaaggagctggaatcaattaaacaagaaataggtgaatctagtcaaagttcagaagacgaaagttttccagagggacctcctccgaagttgaataagaagcaaaaacggcaattactccaacttgaacaatgtcttagtccagacatgaaccctgtgacatcaacactggtgcctaaatcaacatcttttgacctcattcgttccgtcaactcctcttgtaatccctttgaggtcactgaagattcttaccgagaaatgcttcttgctcacaaacggaagaaaatgaatggcgttgtcaagacaaaagtacctaatcgttcccagttaaagcggccaagtagtatagacctccatgccaaaggcggcgttgttgtaaataaaaaacaaaacgttagaagtagtgaacctaggcctcagaagagggcacacaaatcaaagtcatcactgatgcctgtaaatccaaaaattagctcattagatattgaaaattgtgaatcggaaggggatgaaaatgctcttccctctagtacgcttttagatattgaaggtgattcttcgtcttcatcttatctacctgggatgcccaagtccaaaagcaaaacaaagagttttaccgttgagtcgacctcaagggatactggtggcagagttaccgaatcaaatattcagcaaagttcaagattacctgttggtccaccaccgatgtatcccaatcttggaagtatcaacatgatggacttgcctgttgacatcgatgagagtagtcaaatcgatgttgaagatatcaaacctcttcctgagcttctgaagaagactcacccgtgttacttctccttaattcgtgatatattttgctcaacgtgggatcatagactcgggttgttacctctacgagaacaacttcagcaatggtcagaaagttccacatctctcctgaacagttggtattcactggccaaatggacagagttgctgccctcagccctggctttcttaactggggaatcaactgattgtttaccggatgagtttgtgccatacgtggaatacaaacctgcgtgtgatgcctaccagtggatcggtgccggtcgtgactccgatgctcgtcttctatccttgtatcacttttggatggaaaggcgggagaaatcctcggcacaatcaaataacctggacgtggaaaatgtcaaagaagtgaaaagagagccctcgcccctacctcctcccgcacgatgtcaaacatcatgggttgtcacaccagccactcctgaagagcgggaatcctttagagagcaggaaagaaggcgctttgaacaacctcaccgagcattcacttacaggatgcatgggtatgaggccattgtcggtcctgtgagggggatgtacaatgccgctgcaggtggtaaatcacccagagggcattcgctattagttcatgaacggccgaattatgttaccattttaactttagttcgtgatgctgtggccaggcttcctaatggccagggaacacgggcagatatctgcacactgttaagggattcacagtacttgaacacgcaagtcaaagatactgatgttcagaatgttgtgagtggtgctttggacaggctccatgcggagtccgactcaagtgttaagtacgattctacgaggaaaaactggatttatctacatcgagctcgatcagaagcagactttgaattggttcacaaagaaatgcaaggcatggccaaaacaaagggtccaaagaaaatgcaaagggtgaaaaaagattcagcagcgaaagaagcaggagaaggcagttcaaccacaaccgttttgagttctaaaaaagcggactcagtcgccgatattccttcaactcctgcgtcaccaagtatgacaaaaccgaagactatcaaaactttagtgccaaatcaaaatgcgattgctgccgctgctgctgctgctgcgtcagtcgccacagcagagccaacagtgccaagcatacctgcacagtcgcggccagttacggatcctaaaccagtccttgtgaagagaagttctgtgccaaagaaaccaaagctctcgcaaggagccatcatgtcaaaactgctcaaggaaaaatccttaaatcctgtgcctaagccactcagtaaagctaagctcaaagctctggaagcagcagctaaaatggaaacgaaaaatttcaatgctgatgataaatctgtggtcactgaagatgtgaaaccagtgaaaaaagtcaaaagcacgcctaataaaccaaactcaacaccgacttctgattcgatgacaattgttgcgaacattgtgaataagaagcaagagggtagtgggaacactgtattaaaagtaacaaaccaaggtgctggaggtcgtacggtggtgggtcagacgtatgtaaccccacagcagttgatgctcattaaacaagcgcatctactaaataaacaacaacagcaagcaacgagtgatgctcagaaacagccgcaaatgattgtcatcaatcaacaacaaaaggtgctagcagatcagttgtcgctgaagcatcaaaaacagctacagcaattgttattgaagcagcaacagcagcagaaacagctgcaacaacaacagcaacaacaacagcaacagttacagcaacagcaacaagaacagccgcaaattcaacaacagcagcagcagcagcagcaagggcaacagcagccgcatcaagaacaacagcaaaccaagcaaccgcaacaagcaaaacaacaaccaaaacagcaggttcagcaacaactgaaactgcaacaacagcaacaacaaccaaaacagcagaaacaaccacagctacaggtagtccaacaggctcagcagccggaaactcaggaggcatctgaggcaaagccagcacctgaaccaaaaccacaaacgcaaacacagcaaatcaacttatcgtcactacagccagctcagatacagcagttactgctagcaaagcagcagttattggagcaacaacagaagcagggaattatcacaacagctggtggcaaacaaatgatagtcctgaagcaagggcaacagctaatcacagctgatggcaagacaatccaacagcagcagccaatgcagcaaatgataatcgtgaaaggttcatcaccggataaaacgcaaacaacaacaacaatcagtcagcagcaactgcagcaattactcctcaaacaacaacagcagcagcagcaacaacagcaacagcagagcgagggtaaaacatcaataacaaccactgtcagccaggcgcagttgcagcaacttctagcaaagcagcagttcatggtactcaaacagcaagggaaacaagggcaagggcagataaaattagtcccatcaggcacaacggtgtctggtcaacctcaaattaagctgacgcagacaatatccacagctcagttgcagaaaatgcagcctaggataatctcaacgcagaaacctctgacacctgtgtccacgactgtccaagccataagctcaacaagcagtcctctagcaagtggtacgaacatcatcaaaccagttcagtctgtcatgacgaaggttgtctccaacgctcaaacagaatcggtcgtaacagtgggaaatctcctggcgaaccaaaagcagcagactgtgatatcttccgatggaagtatacgtgtagcagacaaaccaagtataggttctcatcagtatacagttgtgtcgatgggagagggtcagtcaagggtcattcaatcaactcagttggttcaggcaagtacaaatctgacaaatgcacggaacattgcgacgaaaacagcaaatttgcgggttctgcaaagtccgacaagtatcaaccttgctcagctcgctgggaaacctgtcattctttcccagaaaactcaaggcatccaaggccagaacatggtcatagctagcagtagcgcaaatacaagtggacagcaaactattctgctaccacaaagtattaagcagccaagcggtagtaacacagtgacagttttgcagtccggaggtgtgccacaacaaatattgttgccagcaggttttcaaggaggtaccctaaatatcaaagctcttcaaggtctcaaagtgattcctgtggcccagtctacccaagtacaaaaaggtcaacgccaaatgttcgctcgaataattagtccagacagcacgaccaaaatcatcccggagcagacgaaccttaacaactcccaagttgctgaacagagtgagtga

SEQ ID NO: 89 - RNA, 1167 nt, Bemisia tabaci
  source 1..1167: mol_type = mRNA
atgagtgatacgttgacccaaagggaactaggcctattgatcatcagattctctctgatcacagttgtgtcctttgtcgcattcaaatggatgttacacaaaatagatccaacaaagaagcagaaggaggaagccaagaagaaggctcttgcaaatctcaaacggctgggtatgaaaacagatactgacttaaatgatcatgaaatgatggtagctgccaatttggttggacctaatgacattcctgtttcttgggatgatgttgctggtttagataatatcattgaagaactaaaatatagtgttatttatcctatcaaattaatgagagcaagaccggaatctcgactcactcgacctccaaaaggagttcttttgcatgggcctcctggttgtggaaaaactttgttagcaaaagcaacggctcgtgaagctggcacaaactttattaacctggaagtttcccttctgactgacaagtggtatggagaaagtcaaaaaattgcagcagcagtatttactcttgcaacaaaactacagccttgtatcatattcattgatgaaatcgattcgtttctgaggagcagaacgacccaagatcatgaggcaactgcaatgatgaaggctcagttcatgtcattctgggatggtctactcacggatcccaactgcactgtaattgtaatgggtgccacgaaccgagcttcggatattgatgctgcaattttacgccgtatgccaactgtatttttcattgattacccttcaacaacacaaaggcagaaagtactaggccttacattgaaaggcgagcaactagcttctgacgttagtttagatgtattggcaacaaaaactgatggtttttcgtgctcagatttgtatgaattgtgccgtaaagcagtgagcactaggaatcagaaagctttccaatcttatgtcaagagccaagaaaacggtggcatttttgattcgaggaatcaaagcaaagaagactcttctaaagacttatcctctagtcagtcgtcaaaatcaccaagtagtaaaagtgaacgtccttccggagacgcagaatttgtcaacataagaataagtccactttgtatggaagattttgagaagtcattggttaaaatgaaagctgcaagaagtatattccagtcttaa

SEQ ID NO: 90 - RNA, 1452 nt, Bemisia tabaci
  source 1..1452: mol_type = mRNA
atgcaacgcgtactttatttcgtcatttttgtcctttttctattcggccagttggacagcagacaaactgcaaaggcagttgactggtgggaaaataccataatctaccagatttatccaagatcattcaaggattcaaacggtgatggccttggagacttgaacggtatttacgagaaactggattatgtgaaagaactaggagtcgggaccatttggattcaaccattctataaatctcccatgattgatatggggtacgatatcaccgatttcagagctgtagatccaatatttggaaccatggatgacttcaagagattggtgcaaggggtccatgaaagggggatgaaagttatcctagacttcgtgccaaaccacacaagtgacacctgtgaatggttcaaactttctgaacgtcgcatcgaaccatatacagatttttatgtttggcaagatccaaaacagttagattcttccaactggacatatccgaataattgggtagatataccatataagttgctgtgcacggagtccttcaaaccgcctgaaatcctcaagcaacaactggggaatgacacccacccaggagcgcaaattccattttataatcgaatggcaaagataaaattcgggactaatgctcacactctggacatgtacatccgaaatatgacggatattttccccgcacgatcgtacaattgggcgagggacaaccacgacaacccgaggatgacctcgcaattctacgaagagagtaaagactcgtggaacatgttgcttcttctcctgccaggagtacctactatttattatggcgatgagctggcaatgctggactcgaatgtacgtcaggatcaggagcaagatccccagaagaggggtagcttccgagataagccgcgggatgggtgcagggctcccatgctctgggatgacagcaaaaatgcaggattcacaaccgccaagaaaccttggctgccggtccacccgaactactatcatacgaacgtggaggcccagaggcgggatcctgatagccacctcaacattttcaaacgcctcgttgatctgagaggaacgcccgtctatttacacggcgacttacaaacttttgtacccaaggagtgggtttacatgttcaccagatcaaccaaggcggaaacgattgcagtgctaatgaatttggggtcggaaacggaggagatctgcgctcggcattctgccacgcatttaccggaaactatgttcgtccatacaagcagtgtcaattctcgcctcaaaattggggacaaagttaaaacaaccgacgttgatgaaacaaaatgcatctccatgagaccgcaatccgggctagttctgagcacaacttctagtgacggcgttaaaatatcgtgttcagccattgttctcatcttagttgcctccttcaaagtcattttatag

SEQ ID NO: 91 - RNA, 2082 nt, Bemisia tabaci
  source 1..2082: mol_type = mRNA
atgatgggcgggttgatgttagcagaggtatggctcgtgacatcgatccttgtcgtcctttcagcaggcaagtcgcttttgcgccacgctcgccaccaactggatcctcccgcatccaacatggacttcgatcacctccctctcagagcctcgcctgagactgaccaactccgcaacccaagacatgggtttggatttcgagacgggatcagcgacgaagggctcaattttcgacactcggaacacgaaggagagaggagcaagtacaaaggagctgaggcggaggaagagatgatggcggacgaaggggacaatgatccgctcgtggttcagacgacgaaaggcaaagttcgaggcaccacgctcaccgcagcaacaggcaaacaggtcgatgcctggctcggcataccttacgcacaaaaaccaatcggggcactgcggttccggcacccgcggccgatcgacaagtgggaggggatcctgaacgcgaccaagatgcccaactcgtgcacgcagatcgtggatacggtcttcggcgacttcgccggctcggccatgtggaacccgaacacgcccatgtccgaggactgcctctacatcaacgtcatcaccccgaagccccggccccgcaacgccgccgtcatggtctggatcttcggcggcggcttctacaccgggacggccaccctcgacatctacgactacaagatcctcgcctccgaggagaacgtcatcctcgtctccatgcagtaccgcatcacctgcctcggcttcctctacttcgacacccaggacgtccccggcaacgcggggctcttcgaccagttgatggccctccagtggatcaggaacaatatccacgccttcggcgggaacccgcacaatatcacgctcttcggcgagtcggctggggcggtgtccgtctccatgcacctcctctcgccgctgagtaggaacttgttcagccaggcgatcatggagtccgggtcggcgacggcgccttgggccatcatctcccgccaggagtccatcatccgcggtctccgcctcgccgaggctgtcggctgccctcacacgcgcgcgcagatccctgaggctatcgagtgcctccgaaaggtcaacgcgagcgtgctcgtggagaacgagagcgggaccctagggatctgcgacttcccgttcgtgccggtcgtggacggctccttcctggacgagatgccgtccaagtccctggcgacgaagaacttcaagaagaccaacatcctcatggggagcaacacggaggaggggaactactggatcatgtactacctgacggacctcttccggaaggaggagaacatccacgtctcccgcgaccagttcatccaggcggtgtccgagctcaacccgtacaacttcatcgtgcggcgcgccatcatcttcgagtacacggactggctgaacccggacgacccggtgaagaaccgcgacgcgctggacaagatcgtcggcgacttccacttcacgtgcaacgtcaacgagttcgcgtaccggtacgcggagacgggcaacaccgtgtacatgtactacttcaagcacaggtccacgagcagtccgtggcccacctggtcgggcgccctccacggcgacgagatcaactacatcttcggcgagccgctcaacccgaccaagaagtaccagccggccgaggtggagctcgccaagcggatgatgcgctactgggccaacttcgccaaaactggtaacccaagtttatcatcagacggaagttgggcatccgtgtactggcctcaacacacaacgtacggtcgggagttcttaacgttagacataaactccactgccatcggccaaggccctcgtttgcggcagtgcgccttttggaaaaaatacctgccccagctcatctccaccactagttaccttgtccctgccaactcaagcaactgcaccagtgcagcgccaagttctctccttcaacatgggttcaataaattatccagtcattcgtcaccgttcatcctcctcctcgctgtctttcagtttctgctgctgcttctgtcgaacagtgccattttgtaa

SEQ ID NO: 92 - RNA, 1767 nt, Bemisia tabaci
  source 1..1767: mol_type = mRNA
atggtgaacagtgtggaagacgtttttgacgacgcagagaacgagattggtgattcctcgcccgttaggaataaaatcgacaccaacatcgatgagccgaaatcgaaaccccagatcgaatgcaaagagtgcaaaagttacgtctactgtcagggtcccctcctgtacgactaccagttctcgggcctcttcaatgactcgaagacgttcgtggacaagcggctcctgttcccggaggaggagatcgtgcgcaagtacacggccctgaagaagtcccgcggcggcgagctctcgcgggcggaactggagagcttcctcgcggagaacttcgccgacgggaacgagctgatcccgttcgagccgccggacttcacttcggagccctcggtgctcggctacatccaggacggacagtaccgacgcttcgcggccaagctcaacgaggtctggaagaccctcgcccgcgtcgtcgaccgcgatgtcctcgagaacccgcgcatgcactccctcctctacgtccccaacaccgtcatcatacctggaggtcgtttcaccgaagtatattactgggacacctactggatcgtgaaaggcttgctgctgtgtgacatgttcgatacagcgaaaggtgtgatagacaatatcatatatctagtcaaaaagtacggctacatgctgaacgggagcaggaactactacgagaaccggtcccaaccaccgctgctcatcccgatggtggccgcctactatcagctcaaacaggacgaggcctggcttctcgaaaatctcccggttctggagttggagttccaattttggatgaacaaccgcatgataaacgtgaaaaaggacgggaaaacgtatcgaatggcgcattacagtgtcgaaacgtgcggacccaggccggaatcattcaaggaggatttcaccctggcgtcaaacctgacctctgatgaggagaggacaaacttgtacatagaactgaaaacagcggcggagacaggatgggacttctctcagagatggacaaaaactcctcctggacaaacagaatcattgctgtacctgaaaacccgctccatcattccggtagatctgaacgcattcctacagctcaacgcccactacctgagcaactggttctttatggctggagacatttcgaaaggtgaatactacctgcagatcgcggaagaactgctcacggccatcgatgaggtcatgtggcgtgaagacttgaaatcgtggtttgattgggacaacgaggacggacagagcagagtagacttctacgcatccaacttgactccactctggaccggaagttacaggaaagcaccgcaagaaatgggaaaattcgccgttgagtacctggtgtcacagggaatcatttccgaggacggtatacctagatatctcggaatcccgacaacgcttaagaatttcggacaacaatgggaagcaccaaacatgtggcctccattacagatgatcggaatccaaggcctggacaacacgctgtaccctaaggcgcaacaggttgcataccggctcggagcgaaatacttggagactaactatgttggtttcgttcgcacaggacagatgtttgaaaagtacgatatgaaccaactgggttctattggaggcggaggtgagtacgtgccacaaaccggatttgggtggagcaacggtgcttgcttcgaaattctcagccgctacgggcacaaactcaggagcccccaggagtaccccctcccaaactaa

SEQ ID NO: 93 - RNA, 789 nt, Bemisia tabaci
  source 1..789: mol_type = mRNA
atggaggacatatcatcttccggcgaagaaatcagcatgaaagcgatctcaaaagtgattggagtgcccgatattcgagatgggcccactctcacaaaatgcatagttgctgagttcgtagggactttgctgttagtactcataggatgcatgtcggtagcatttgtccatcaggacaacttcgttgacgttgtgaaaattgccatggctttcgggctcattatcgcctctatggtccaggcaataggtcacgttagtggttgtcacatcaatccggctgtaacttgtggactagctgtgtcgggacatgttagcataataaaaggtatgctgtacattgtcgcacaatgccttggagccatctgtggagcaatcattctgaatgaaatcacgccaaaaacaggttacacggctgctggtaatctgggagtaacgacactgtctacaggagtttccgacctgcagggtgtggcgatagaagcactaatcacatttgtgctgcttttagttgtccagtccgtctgcgatgggaagcggaccgacatcaaaggatctatcggcgttgcgataggattcgcaattgcttgctgccatctcgccgcgatcaagtacaccggtgctagtatgaaccctgctcgatcattaggccctgcattcgtcagtggaatttgggacaaacattgggtgtactgggccggtccaatactcggtggagtcactgccagtctgctttacgccatcactttcaaagccaaaaaaagatcggatgagagctcttatgatttctga

SEQ ID NO: 94 - RNA, 2595 nt, Bemisia tabaci
  source 1..2595: mol_type = mRNA
atggggacactcttccgaagcgaggaaatggccctgtgtcaactgtttatccagccggaagcctcatacacctccgtcgccactctcggagaggccggagttgtccagttcagagacctgaacgcgggcgtgaactcctttcagcggaagttcgtgagcgaggtgcggcgctgcgacgagatggagcggaagctgcggtacatcgaggtcgaggtcagcaaggatcgcatcttcgtgcccgagtccaacgtctgcccgcccgcccccaacgcccgcgagatcactcaactcgagtcacatttagagaggacggaaagtgaaatccttgaactcagtcacaacgctgtaaatttaaaatcaaattatctagaattgacagaactgaagtatgtgttggaaaaagcgcacgcattttttcaagagagtttctgtttaaaacagcaagagggcgccagtggctcgggcaacaacgactcgctcacgaaagcactcatcagcgatgaaagccagcagcagtcctctcgcggtagattagggtttgtcgctggagttgtgccgcgggaaagagtgccagcgtttgagagaatgttgtggcgaatcagtcgcggaaatgtattcctgagacaagcagaattagaggaaccattggaagaccctgctacggggaacgaaatttacaagactgtttttgtagctttcttccaaggagagcagttgaaacatcgagtaaaaaaagtatgctcaggattccatgcatcattctaccaatgtcctagctcgcacacacaaagacaagaactgctaaagggcataaaaacaagattagctgatcttaatttagtattaaaccaaacacgagatcacaagcaaactgtgttacgcagtgtagcggagaagcttcatggttggacagtgcaagtccggaagatgaaagcaatctatcacaccttaaacttattcaacatggacgtaacaaaaaaatgcctcattggagagtgttgggtgcccgtcaatgatttaaccttcattcgcaaaactcttttagatggtagtaaagctgtaggcagttcaattccatcatttctaaatgtaattgagacgaacgaaaatcctccaacatttcaccgcacgaataaatttaccgagggctttcagaatctaattgattcatacggtattgcttgttatcgtgaagttaatcctgcactgtatacaattatcacattcccatttttatttgctgtcatgtttggtgatgcgggtcatggagccatcctagccatatttggaggaatcatgatttattttgaacagatgtttctcaagaagaaatcaaataatgagatttggaacatattttttggtggtcgctacatcatattcctgatggggctgttctctatatacacaggaatcatctacaacgatttcttctcgaaagcagtcaatgcatttggctcaagctggtttagcaattacaacgaatccactattctcagtaactctgacatcactttagatcctgtttatcaatacaaacaatatccttatcctataggagtcgaccccgtttggcaaatttctagcaataaaatagttttcttcaattcattcaaaatgaagttatcaatcatatttggggtggtgcatatgatatttggtgtcatgctgagtgttatcaaccatatccacttcaaaaggaaaatgagtattattttggagttcctacctcagttaatccttcttatccttctatttttttacatggtcatgctcatgttcatgaagtggactctatatggtcctcagaacccgctaaagaccagcccccgatgtgcaccatctatcctaattatgtttatcaatatgatgctcttcaaaaacaacgaaccatttccaggctgtgacgaatatatgtatgataatcaggaatttattcagagacttatcgtttttttctcgttcctctgtattccggtcatgctattcggaaaaccgatctaccttatatattttgccaataagcccactaaacgtcacttttcgagtaacggcgaggctcaccaggggatagaattgcaggaaagtcggaacatggacgtggagacagacgtggtcacagccgaaacgcaggaaaccctggagactctgatggcacagacggagacggagcaagatgtccagcctgtggaggaacacgaggaaccgagtgaaatcttcattcaccaggtcattcacacgatagagtacgttctcagtacggtctcgcacactgcgtcctacctccgactctgggcgctctccctcgctcatgcacaactgtcggacgttttatggggcatggttctgaagattggactccaaagagagagccacgtaggtgctctagtattgtttataatgtttgccctctgggctgtgttcactgttgccattttagtcatgatggaaggtctctcagcattccttcatacactccgtcttcattgggtggaattcatgagtaaattctacacggggaccggatatgccttccaaccgttctctttcaaacatattcttgagagtgaggaatacacgtgtaatgaagaataa

SEQ ID NO: 95 - RNA, 3573 nt, Bemisia tabaci
  source 1..3573: mol_type = mRNA
atgacagtaagcctaacttttaaagttggctcccttccgcggatgagcgtgataaatccagcaaaaatcatacacaacacaacatcgaacggtttcttcggaattaatctaaagaagacaggcgtctacgatagtgcaaactggaattacccgatcgcgctcggacaatcaataaaacgcgactcgatgattctgagaaaaaccgaattccgatcaaataaatatggcaaccgggtggctagaatgataagttgctgtcgattggaaaatagaacgaagctgtccgtcactgcggccgacaaaaatgaaaaaggcgcggggcatagcgcggttcagggggtggagggggggctgaaaaaagaggaaaatgaggaatcagtatctggctctgaggacgagaccgaaagcggacgagaaggtgaaaccacgggtgaaaaacttgaccccatgtacaactgcgagtcttgccaggcggagttcccgggcttgtccgagctcttagatcataagaaagattgtgtctcgctgaggacaccgatgacgaatagctcgaggtccggtgatgaaggtctcgaaaacgagaatgacgccgaagaccacgaggccctggacgatcccgagcaggagactgaaaatcctcaagaaaatgatgacgaggaggtagacagcatcaacgaagagggaaaacgacgagaagaggtgcgtcgtcaacgccaggatgctgaaaacaacaacagcgtggaagagggcgaaactgaaggagaagagaacgagttgccccttgggtttccttttccactgcccggccacgtgaccttggaagctcttcaaaataccaaagtagccgtggcccaattcgccgccactgcaatggctaacaacacggacaacgcggccgccctccaggagcttgctgttctccagtcaaccctttacaccctccagacgcagcagatgatgcaactgtcacttatccagcagttgcagaggcagcttcaaatcacacgtccaaaggatggtccgtcacctcctcctacgcaactgcctgccggtattcctatctgtgttccaaagccgcctctaccacctccagctgcaccaccacgtcctagcagaacccccaccccggtcaaacacgaagttccttcgacgcctcctacgtcacagtccctaccggccacgcgtcctcagtcgacaactccaccagcacctcataaaccggctgcctcctcgtcccccattagcattccaaccccatctctacctccttgttcgatatcctcttcgtttgcttcctccatcatcacaaattacgatcctccgccgtcgccgagcgaacccaacacgttagagatgttgcaacgacgagcgcaggaagttttagataatgctagtcaaggtctcctcgccaataacctagccgacgagctagccttccgcaaaaatggcaaaggaggctcaatatcgccttacgactccaagacaggcggtagaaatgaaccattcttcaagcataggtgccgctactgtggaaaagtcttcggaagtgattcagctctgcagatccacatcaggtcgcacacaggtgagcgacctttcaagtgtaacgtgtgtggtagtcgattcacgaccaaaggaaacctgaaagtccatttccagaggcatacttccaaattcccgcatatcaaaatgaatccgaaccctgttccagaacatttagacaaatatcatcccccactgttggctcagattgggcagcatccaccaggagttccgtctcatcacccagtccctcctcatccttcgttcccgtccagtcctccattcccacactctggtctaccactctaccggccaccaccatcctctccgcacgatctcatcctgcctccccatcatccagccctgaggccccaagaaaatttaatgaaacccttgttacctttacctctattcggtccaagaccagtcgagcaagaaatgccggaaaatcttagtaaacccgtttcatctatccagtcgtcgcctcctccaccatcagaacacagtgaccggtgcaagagggaatcatgtgacgaagatccacaagacttgtcggagtcaagtgagcccgctaataatgatctgaactgtcgcagcatttcaagattagacatggaaaatgactcggatcacgagccggaaaggtatacttctccctcgccctacgacaactggagcatagacagcaagcacagcgacgaggatgcaatgcgagatgtaaacagccctggcatggatagtcttcaggaccagcccgagaacctttccaataaaacctcgtcacaccaaccggtgagcccttccgcggcggagttggaggctctggacctgacgccgcgccctccagcagggatcttcgccgggttcaacctgcagcctccgtcaaaatcgtcgcccgccgccatgccgccaggtctgcctgcctcgttcagtccagtgggattctccacagtgaggggcaatacgacttgcaatatatgttacaagacttttgcgtgcaattcagcgttagaaattcactataggagtcacactaaagaaaggcctttcaaatgcaccgtctgtgatcgaggattctctaccaagggaaacatgaagcagcacatgctgacgcacaagatccgcgacgtgggggcgcccaacaaccacggccactacgatccgaagacgccgctctcgacgacctcctcgctgcacgacgagacctccaacgcctcgacggagagcatgaacacgagccggagcgagcgagagcgccccgtctccgtggagcccccgacgcccgccccgccggcgcccctcaagatggagcccaccccgccgcccccgccaccgccgccgcccccgcagcaacccctcgccgccatcaagcgctcgccccccgaggaccctgccggtgccccgcaccccaagcgacaaccaagtataccaaaacatttgtgccatgtttgcaataagaacttttcatcctcatctgcacttcaaatccacatgcgcacgcatacaggagacaaacctttccgatgcactgtttgtcagaaagctttcactaccaaaggcaatttaaaggtacatatgggtactcatatgtggacaaacggagcgtcccggcgtggacggagaatgtccttggatttacctcccctgcccaaggattcgccagaatttctccagcggcgtcctgatctcttttatccataccttccggcaccattcctcaatggaatgcagcaaaagttaaatgaaatatcagtcattcagaatgttggcagcaacgtaactaatggtttacttggatttggagcatatggtggcctacattcaggaatgaaaacccctccatcgcctctatctgaaaagccggcacattctcccttacagcaccttggaaccccacctggactgtgggatctgcattttaatagaaaatctccaaatgaaaatagtgaagatcaaatggactgcccaccttccccgccacctcctggtcatgttccaccaccgccacgaggagagggtttggcagcttga

SEQ ID NO: 96 - RNA, 3438 nt, Bemisia tabaci
  source 1..3438: mol_type = mRNA
atgatatttgctttgatcgcattgagctcagcggtaaaggccggcgtgactttggttggcgcgagcgtgtggttggtgccgttgctgatagcagccatcgcttactatagatacgacatgtttgacccggagagcaggatcaaaaatcaggtgcagctaaaccgggagtacgacttcatcgtgatcgggggcggctctgcgggggcggtggtggcgagccgcttgtccgaagtcccccattggaccgttctcctcctggaagctggacctgacgaaacagagatctcagatgtaccctctctcgccgcctacctccaactctccaaactcgactggggatacaagaccgaacctacagttaatgcccaccgaaaatggcaacgctgcgctgtgagtggtgtcgggcgtgactcagcagtctgcggtgtgacgcgacgggcggccgtttacacggccgacaacggcgacgagcgtttgaaccgggcgaagacgacggacgcatttatatggaacccgggctggagctacaaggacgtgatacactacttcctgaagagcgaggacaaccggaacccgtacctgacgcggacgccttaccaccgctccggcgggtacctgacgatccaggaggcgccctggaggaccccgctcgtcgtcgccttcgggacgattcggcggggaagtcgatgcagcacggcgaaggctttcttgcgcccggcgcggcaccgacgcaacctgcacgtcgccatgggtgcccacgtcacgcggatcctcatccacccgcacaccaagcgcgcttacggggtccagttcgtggttttatctgccggtgccataaacagtccgcagatcctgatgctgtccggaatcggtcctagcgaacacctgcacaagcacgggatccctgtcgtggcggacctccgggtcggggacaacctccaggaccacgtggggctcgccgggggcctcaccttcaccgtcgacaaacccgtgtccatagcggtcccggtgacgatgagctacgtggtgaaggagcggggtccgatgacgacactggggggcgtcgaggggctggggttcgtcaacaccaagttcgccaacgagtcggggttgtacccggacatccagttccacatggcccccgcctccatcaacagtgaccagggctcccaggtccgcaagatcctcggcatcaccgaccgcgtctacgatctagtctacaaacctataggcagttgggtgcgattaaggtcttcaaacccttttgagtacccgtatattgatgcgaattactttgcgcatcctcaagacattgccacactagtggagggagtcaaaatagctttgcaggtgaacgcggcgtcgcccctgcggcagttcaactcccggctccaccggatcccgatccctgggtgccatcgtctagccttcggctcggacgcctactgggagtgcgccatccggcacctgacgatgaccatctaccacccggtgggcacctgcaagatgggtccctcctcggacccgacggccgtcgtcgacccgcggctccgcgtctacggggtgagccacctccgcgtcatcgacgcctccatcatgcccaacatcgtctccggcaacaccaacgcgcccaccatcatgatcggcgagaagggcgccgacctcatcaaggaggactggttcagcaaactgtttctggaggtggccttcgggatcctgacactatgctccttcgagaacgggttctcgatgggccagtacgggccgaacgagtcgcaagaacagctgcggctgttcgagggtctcggggccgtgtttttggacggcgagaggttctaccgctccgagcccccagagacgaggaggattttatccgcctacgatttcatcatcatcggggctggatccgcaggttgcgtcatggctagccgactttccgagatacccgattggaaggtcctgttgatcgaggctggacgaaacgagaactacttgttcgacattccgctggcgacatcgtttctccagttgacagacgccatcaactggaattacacgccggagccgcaggccaacgggtgcttgggtatgaagggtggcagatgcgcctggccccgagggaaagtaatgggcggtagcagcgtgctgcactcgatgatccacacccggggcgaccggcgggactacgacgcctgggccaacgctgggaacccaggctggacctaccaggagctcctgccctacttcaagaagtccgaggacatgcagatcccggagctccagcgcgacaccaagcacaaaatgcccaatgacgttggatcgcgtagcgcccagaacaccctgatagccatttgtgacttcctaactagtccctacatctgtcttctaggtacacgactgagcgcctctcgggccttcctgcacccggtgcggaaccggccgaacctgcacgtgctgaagaacacgctggtgacaaagatcatcatcgacgaggagacgaagaaggtgcgcggcgtggagttcgtgcgcaattcgcagcgcttccgcgtcaaagccacccgcgaggtcatcctctcggccggcgccgtcaactccccgcagctcctcatgctctccggggtagggccccaggaccacctcaaggagctcggcatccccctgctcaaggacctcccggtcgggtacaaccttcaggaccacattgctcttggtggcttgactttcctggtgaacagtaccgtctcgatcaagatggagaggatactgcgaagcgccaaggcactgaatgactatgccttatacaaacgcggaccattggccgttcccagtggatccgaagccattgccttcatagacaccaaaagaccttttgaccccgacggctaccctgacattgagttcctcttcatcggaggaagctacccctcaaacccccttcacaggtacatattccggatcgaagacacgctgtacaacaaggtgttcctgccgatccagaaccaggacgcgttcatggtgttcccgatgctgatgcggcccaagagcaccgggcgggtcatgctccgctcggcgaacccgatggccaagccgctgctcttcgccaactacctcaccgtccaggaggacgtggacaccctcgtgcgcggcgtccggtggatgcagagggtcgccgagaccccggccatgcagaagggtttctcatcttcaggtcctttgtttctttttgatcactccttgttacgtcctttgcgttcgagcttcattcctggtagtgaatcatcgcgaacacatgaaactcgtctgagatgtaggatcgtgcttgattattttcgttttatcatgctgctgactgaagaaatcaacatgagatccgattgcgaaaatccgaacagcaaaaaatgcgtacaggtgggcggcccttggcgatggaagggataa

SEQ ID NO: 97 - RNA, 609 nt, Bemisia tabaci
  source 1..609: mol_type = mRNA
atggcggataaggaaaagaagactaagaagaagaagaaggaggagccgaaagaggaggctccccctccaaaggaaccaactccacccccgccagaaccagaaaagccagtgtctgtaaagaagaagagttcctcaaagaaagttaagaggtccggcagtaatgtcttctctatgttcacccagactcaggtcgctgagttcaaagaaggctttgctttaatggaccacgacaaagatggtatcattggcaagaacgacttgagccagacctttgaccaggttggtaaactcgtcaatgagaaggaattggacgccatgttggaagaagctcccggcccaatcaacttcacccaactgttgtctcttttcgccgctaggatgtcaggaggctctgatgatgatgcaactgtgatcaacgcatttaaagcttttgatgaaggtggcatgatcaacggaaaagctctgaggcacgctctgcaatcctggggagacaaattcgaaaagaaagaagtagacgaaatctatgacaacttagatttggacgacaaaggctacttcgaaactgatgaaatcatccaacttcttttgggaagctccgaagatgaataa

SEQ ID NO: 98 - RNA, 4554 nt, Bemisia tabaci
  source 1..4554: mol_type = mRNA
atgaaatctaagtcagtaacttttgtaatggccatgttgccaggtgccaaacagctgttctgtgttgtgatttggaccgtgttctcgcttttcatcctcggcagctatgctgagagacgctacgcctacacagagaagcagcgatatgacgggtggttcaacaatttggcgcatcctgattggggctccatcgatacacaaatgacacgaaagacgcctccggcctacgcggacggagtatacatgatggccggtcaggatcggccgagccctcggcgcctgagtacaattttcatgaaaggggacgacggtctcgcctccgccaaaaaccgcagcgccatcctcgctttcttcggtcaggtggtgagctccgaagtagtcatggccagtgagagtggttgtccaattgaggtgcatcgcattcaaattgacaagtgcgatgagatgtacgatccagactgcgctggggacaagtccattcccttccaccgtgctggctacgacagcaagactggacagagccccaacaaccctcgccaacagataaaccgagtgacaagttggattgacggaagtttcatctacagcaatagtgaggcatgggtcaacgccatgcgctctttcgtcaatggttccttcaaaactgatccaactggcaagtggcccgttcgaaataccatgcgagtacccctcttcaacaaccctgttccacatgtactccggacactttctccggaacggctctttttgttgggtgatcctcgaagtaatcaaaatccagccctcctaactttcagtatattattttttcgttggcataatgttattgccaagaaagtgcaggaagcccatcctgagtggtcagatgaagaagtttttcaacgaacaaggaggattgtggtcgcaactctccagaatatcatagcatatgaatacatcccagccttcacaggtctagaattaccagaatacgagggttacagtatagatgtccatccgggcatcagccatgtttttcagactgctgcttttaggtttggacacacactgattcctccgggtatttatcgaagagattccaagtgcaatttcagaaaaacacccaagggtaaaccagcacttcgactttgctctttttggtgggactcaaatgatgcagtctcagagagctctgttgaagaactacttatggggatggcatcacagcttgctgaacgcgaagatactgtactctgctcagatgttcgagatagattattcgggccaaatgatttctctcgcagggaccttggtgcactcaacatcatgcgaggacgagacaatggtcttttagattataatacgattcgaacctacttccaccttccaaaggtaacatcgtggaaagacatcaacccaaccttactcggaaaacatccagaattagtgaaaaaaatgtcagacgcttatggaggctctctagataatgtagacctctacattggtggaatgctagaatcaactgatggtcctggcgagcttttttcatccattatcattgagcaattcacaagacttcgagatgctgataggttttggttcgagaacaaagacaacaacatcttcacagaagaggagattgctgacctgcgaagagtgacattatgggatgtcattgttaacagcactgatgttccccctgacgcaatccagaaaaatgttttcttctggaacgatggtgatccatgtccacaaccagcacaactgaatgctagccagctggagccatgctcttacctcaagggctatgactattttgagggaagtgaattagctttcacctacgcaattgtcttcttgtgcgttgttccattaatttgcggtgctgcaggatatggagtagtaaagttgcagaaccgtcgacgaagacaactgagaatgaggcaagaagaacttaaatcagggccagtcaaaacctctggcctagccacagtcgataaaatggctgtaagggagtggctccacgcaaaccaccgccgtctggtcaaagttcgcttcggaccagaggccagcctacacacagtggatcgcaaaggagaaaagctgaggtctgtcaacttcaaaaatgctgatactatcaccattgaagaatctctggttgatgaaagagggaaacgtaaacgaccaatggtgttgatcagggtgcctcgagaccatgacttagtgctggaatttgattcatctgcagcaagacgcaaattcttatcaaagatggaaggtttcctgaattcacacaaaaagcatctgattgttgttcaggctccacgagagttaatgctggctaaagcagaaacaagagaaaggagacaaaagcgactggaacatttcttcagggaagcatatgccttgacgttcggcttgaaacctggcgaaaagcggaggcgggaagatgaaggtggagaggtcgttatgagaacatctctatctcgagctgagtttgcctctgctttgggcatgaaaccagatgctgtttttgttagaatgatgtttaacattgttgataaagatggtgacggacgaatctcatttcaggaatttttggatacagttgtcctgttctcacgaggaaaaactgaggacaaattacgaattatctttgacatgtgtgacaatgatagaaatggagtaatagataaaggggagttgtcggaaatgcttcgttcactggttgaaattgccagaacaaccagtttgtcggatcaacatgttacagatttgatagacggcatgttccaggatgctggtcttgagagcaaagactttttgacttatgatgatttcaaggaaatgatgagagactataagggagacttcgtggcaataggcttggattgcaaaggagccaaacagaatttcctggacacatctacaaatgttgctagaatgacaagtttccatctggatccatctcttgacgaggaccgcagctggttgaaaaagaactgggattgtctcacaacattccttgaggagaaccgacagaatattttctatctctttatattctacgtcatcaccatttctctcttcgttgaaagatttatcaaatattctttcatgtcggaacatacggatctgcgacacataatgggagtagggatcgccatcactcggggctcagcagcctctttgtcgttctgttattgcttgctgctgctgaccatgtcgcgtaacctgctgacaaaactgaaggagttttcaatccagcagtacattcctcttgatgctcacattcagttccacaaggtggctgcgtgtactgccctctttttctcactcttgcacacggttggtcatatagtcaatttttaccatgtctcgaatcaaccgctggagcaccttcaatgcctcacatcagaggtccatttcccctctgactacaaacctggcatcacattctggctgtttcaaaccatcaccggaattactggggttctcctttttgttgtcatggtcatcatttttgtgtttgctcaccctacaatccgcaagaaagcttacaagtacttttgggcagcacatagtctttatgtggctctttatgctctcatgttggttcatggtctggcacgaattacaggcccgccaagattctggatgtttttcatcggtcccggtatcgtctttattttagataaggtggtgagtctgcggacaaaatacatggctttagatattctagaaacagagctattgccatccgatgtaatcaaaatcaaattctatcggcctccaaacttcaaatacctatcgggccaatgggtgcgcctagcatgcacagcattccgtcaatccgaattccattctttcacgttaacatctgcgcctcacgagaatttcttatcatgccacatcaaagcacaaggaccttggacgtggaaactgaggaactattttgatccttgcaatttcaatgttgaagttgatcaacccaaaattcgattagaaggtccatttggtggtgggaaccaagactggtacaaattcgaagtagcagttatggttggtggtggcataggtgtcacaccttacgcctccattctcaatgaccttgtctttgggacgtcaaccaatagatattcaggagtggcttgtaaaaaggtttatttcctgtggatttgcccctctcaccgtcattttgagtggttcatcgatgtactgagggatgtggagaagaaggatgttacgaatgtactggaaatccacatatttattacccaatttttccacaagtttgatctgagaacaacaatgttgtatatttgtgagaaccacttccaaagattatccaaaacaagtatgttcactggtctaaaagcaatcaatcattttggacgtccagacatgtcatctttcctgaaatttgttcagagaaaacatagttatgtaagcaaaattggtgtatttagttgtgggccccgtccactgacaaaaagcatcatgtctgcttgtgaagaagtgaataaaggaagaagactgccatacttcattcaccactttgagaactttggatga

SEQ ID NO: 99 - RNA, 327 nt, Bemisia tabaci
  source 1..327: mol_type = mRNA
atgagcgaatggacatacatgttcacaaggagtacctctagagatgatacagtggctgttatcataaatctaggaactgaaacggaggaagtttgtgctcaaaattttgcagtaggtctgcccgacattatgacagtttacacggcctcgttaaattctggatttgacgttggggatagaattacgacatcaagggtcaacggaggaaagtgtgctgagttaagacccaaagcaggcttcgtccttagtgtcaattccggcagtagcttgctttgttctgcgtacctaattccccttttagttttttttttttttttgtatacttaa

SEQ ID NO: 100 - RNA, 4005 nt, Bemisia tabaci
  source 1..4005: mol_type = mRNA
atggctaattttactgtcggcagccgcgttgaagttaccggcaaagatgttcaaggaacagttgcatttattgggccaacatcattctctcaagggaaatgggttggaattatcctagacgagccaaaaggaaaaaacaatggcaccatcaaagggaagcagtattttcagtgtcccgacaactatggaatgttcgttcgtcaaatgcaactcactcttatcgatgagagtgggaatcgcattgatatggccaattctggatccacgtctctaacatccctagatgactcgacctcttctaagctgacacctccaggacagcgttccaggttgagcagctctcggttatctctggccagttcaaaaagtggctccactccgtcaaggagcaaggaagatgtgcgactatccaccggaaccctcgctgactcttcgttgtcagacaattcaacaccgtctgaggccaaatccgctaatggtcagcaagatccaccatcgcttcagaaacgtgcatccttcgtagagcaatctaaaaactctccgtctactccaaagacctccaaactgacctccaaattagttgctcctaaagtgagatcgaaattttcatctcccaaaatacaggctaataccagtagtagctccaatgtcgaacctaattccaattcgcttgaccaacaaactggttttgtcgaaactttgaaaccgcagttcacaccaggtcaagtcatgcaaccagcctcaggtccggcatcaacgcaaagaccacctccgggtcctgtaatcgacccagcagagcatgaggcactgaaatctcaagtcaaagatttaactgaaaagttagacacaatgagactgaaacacaaagaaaagacgcaaacactggaagccatgaaaattcagctggaccaagctgctgagtttaaaataaaaattatcgaatcacaagctaatttgaagaaagacatcgaacgcttgaaaaaagagaagcaagatgctctagaggccaaaaatgaattttctgacctagcagaaactttggaaatggcaactctcgacaaagaaatggcagaggagaaggcagaaacgttagagttagaactggagcaagcaaacgaaaggattgaagagcttacacttgatctagaaataatgaaagccgaacttgaaaaaatcactagcggacacaatgcagaaatcaataatgaagatggagcgcccgtcacaaactatcagctaaaacagttagagcagcaaaatatcaggcttcatgaaactttagtcaggatgagagatgtttctgctcatgaaaaacatgaaacacaaaaactgcagaaggagcttgaacaacgaaaagcagaaataaacgatttaagaaaaaatacggacaaattaactgctcgctgtgctgagttggaggagcaagtggctgatctacacgaacaagtggatgctgctttaggtgcggaagaaatggtagaacaacttagtttacaaaaattagtcctggaggaaaacgttagtaaattgcaagaggaagtatttgatttagaagctctgaaggacatcagcgatcaattgcaagaagacagccgagagcttgaacttcaacttcgtcaagatgtcgacatggcaaatgccacaattagagaggtccagaaagaaaaagaaaacgccttggagatgctagcagatagggaactaacgatcgtaaaatttagagaactggtcgcaaagctaaaagaacgctgtcaagagctggagcaccaactggacagggaatgcaacagtaaggcagccatgagcctgagcattccagagatgctcgactacaagaagattttcatagactcaaaagcgctcgcacgtgccatagacttagaattaagacgaatggaagtggaaatgttgcagcagcacgtgaatctgctccaggcattcatgccggattctttcatgaaaggcagtggtgatcatgacgctgttcttactttgctgttgattccccggctgatctggaagagtgagatcctaatttctcaaactagggataaattcccagcaatagaaattactactaatcgggaagctctcctcaaagatcactcagctaatcaatttgcagcgcggtcgcgtttttgttcttatctctacttcttacaggctgtgctgcggcagttccttaatggactcaacacttgtccaccagatcttctgatgaatatagcaggcatttttccggagttgaacctccatgagaaaactatagatagctatgtagaactattgcgaacgaaccaactagatgaaaatgtcaatactgatgcgttagagaagtgcttgaattacttttgtgccatgcatccagcgtatctgcttcgagccggcgtgaacctacaccaaagctttttgctctcggactatcacaaagcattttcagcggctattgatagcctccgcactgatgctgcaatcatcaatgccgtgatgcagccggaatctaacccacacgatattgaacttttgtgtcagcacttaatgacatcgtgtgaagtcatgttcacgcacttgaaaccagtccgattactcctgtctagctcacctggtgctgagaaaacagctgattttggtcttggagaaatgttcttgcagaacaccttatctcaagctcaaacacatgcaatgaaagcctcaaaagttatccgtgatatagccagagtttccttttcttcaattgtaatcactggagctgttgacaatgaagtgggaattgacaagaacaaaatgttcgaaattgccacgtcttgttgtgatcgtgtgtttgatgatacattgcaagggccagttgctgtgatcaaaaatgaaatcaatgccctagctgcagatattgccaatttagcgcagacgattcaagagacaattcactcatcatcaaacgttgctcaggcgaaatcgaaatcttccgttgagattacgccaccaattatggttcgtgccaagcagaccaaagaagaattaggaaacaccaaagttcttcgaacgaagatcgaggctttggatgctgacattcgtgagttaaaaatgactttgagagccaaacaagaagaaatcggggagttgtccgtgaggaaagagttagcagagaagaaacttgcaaatgctgtcagagacaatgaattcaatactcaaaaattacaacggaaattagaagaagctcagaatcagctcaaacgaaaagagaaggagtttgaagagacaatggatcatttgcaatctgacattgacaacctggaagcagaaaaaggagaactgaaggacaaactgaagaactactccaaaaaagcatttatcgagggtgttgcagccaagacagtaggcggttcgttaacatcacctgttcacagtggagggcctgtccaagtgatcgagtcaccactgcttcttgacgagatcgataacttacggagagccctggatgtggtgcaaatggagaaagggcagctagaagcgcagtattgccagaagattctggatggcatgaaaccgttgatcatcccgcagaaaccaacaaaaacgaaattagacgaactcaaaattaaagccaaaaatctacgccaggaattattaataaagtccttaccaaaagtgcctgatcttagcaaacgaattattggtgtggagccagccttagatcctgcttatcagaagcatttccgtcagaaaaaagaaatgaaggaattgcaaaggaaagcagatgctcttgagacggaaatccaagaagaaattatcaggcaaaaagcaggtagcggaatagacactgatctaaaagtatttccaactcctgaaatgacaaaggccttcaaagagatggatcccattttaataggtgaagtagtcgttcctgtacccgccagcgatcccgacagtggtcaaactaggaaattattcttagatagtaatcaattcaaatgccttcaacagaagctcttggctatgggaacgtag

SEQ ID NO: 101 - RNA, 3279 nt, Bemisia tabaci
  source 1..3279: mol_type = mRNA
atgaccatcgtcgtggctcttatctatttcctaacctcgagcgtcctcaatgtccagtcctacatcctcggccgcagagtctccgaggactcatgtcgcatatccttgagccgggacctggccacgatcccgtcgctgatgatcaacgagagcgcggggaccctcctctacccgacagaggatgacgtcatcgtcctggcgcccaacgccgagttcctcctgtactgcccgtccggcttcgccgagcgccggatccagccgaggggcatcagggtcgtctgcaagcgggacaactcggtcgtatacggcaacgccacctaccggatcaaccaactcggctgcaccaagcaccccgattccaccctccgccgaaccggagccacctgctcgcgagggaactacacgctccttcacgtgggctacgagtatgagtccgaagagagtcccagcgtcggcggtgaaggagatgatggaggaaacggcgtgggtctcgacaacgacgtcgacgcggacgaggaggagacggaaacgggtcgaaacgaaactggaaacggtatcgaagcggagacggaagtgagccgggatgaaaccggaaatgagatccgtgaagttgaggcggagacagaagtgagtgtgaatgaaggtggagacagcgttcgtgtagtcgaatcgggaatgggaacagacgcaggtgaaaccggaaatggggtccttgctgtcgaagcggagacagaggtaagtgtgggtgaaagtggacgtggcgttcaaggagtcgaaccggaaaaggtaacggtcgtagatgaaaccggaaatggggtccttgctgtcgaaggggagacagaagtaagtgtgggtgaaagtggacgtggcgttcaaggagtcgagccggaaaagaaaacagccgcagatgaaaccggaaatggggtccgtgcggtcgaagcggaaacagaagtaagtgtggatgaaagtggaagtggcattcggggaggcgaatcgggtaaggaaacggacgctgatgaaaccggaaatgaggtccgtgcagtcagagtggaagtagaagaggatgatgagaaaacggcagaagtgaagatggaaatgggaatgggtgaaaccggagacggtttccgtaccatgaagcccgatcatttcagtggtaaactcaaagttggtaagcagggaggagccgcgtcgacaactacgaatggaggaattaagaatgattttgagctgagaaacttgaaagtcgtgcccgaaaaagaaccgacggatacggaagttgacacgtccgttaccgtaaaggagagcggaggtgactcgaagctcctaagtttgttcgccggttatcggatgcgaatacaagaaggagtccacaatgttgccttcgacttgcctttaaattttaggagcactggtagcaggaaactcgctcctcttgtagttgaaaatgtccgcgcgttgggcacattcacaaccggaaacaacatgagtggtacaaacggtcgcgtgacgcgtgatgcatcaaacattagaataagacaggaagagcagacaccaatcagagacggaatgaaaatgatactaatgaaaaaaatgtttgcaaccggaagcgacgccagccttctcgatgacggttacagcttaaagccgcatgatgcacgcttcaccggaaacgatgtcaggctgactgaaagcagtgctagcctcactgcgagtagcaacatccgcatcggtggaattacgaacattaacgggaacgacggcggcttcatcggaggaagtgtaacccctgccgaaaatgcagctagctccgccggaaatagtgtaagctttaccggaaatattgaaggtctaatcgaaagtaccaccattcacactgaaggtgaacccagctatacctatactggttcgaacctttccggaggtgacgccagctttactagaaatggcgccggctccaccggaaatggcctcagcctttccgaatatagtgctaattccatcaggagctataccgctttcgctcggaacggccacaactctgctggaaatgcccatgacccgagtctcaccggaaatgaccccagtcttaccggaaatgaccccagtcttaccggaaatgaccccagtcttaccggaaatgacctcagtcgtaccggaaatggccctagtctttccagagatgactccaattttcccagaaatagtgccagtcttccaagaaacggtccgggcttcgcccgaagtgattccaagcacaccggaaacgccaaacggcggaacaggaaacggcctcataacaagagtgccacaagcgaaaacgttctcaatccagaaaaggcgtctttccgccggaggccagtgggcgaagtgaggttcatcaagctgatcgagatctgctacgacctggagcggcaccgggcggtgtacgcgagccacgagctggacgagcggatccgcggacgacagcacagcgtcccgcggatcaacttcaagacggacatcttcgacgaggagcgcatcgacgtgaacgccctgtacacgcggaaggggcagctggcgcggctgacggctctcctgggctcggccgacctggccaacgagtacatccgtcgcgacgaccatttcctcgcccgcgggcatttctcgcccaaggccgacttcgtccacgccgccgagcagctggcaaccttctactacgtcaacgtcgcgccccagtggcagaccttcaacgggggcaactgggtcaaactcgaggatgctctgagggacctcatcgtcaagcgccccggaaaactccacgtttacaccgggacccacggcgtgatcgctctgaaggacatcaacgacaacgaagtggagatctacctgggcgagaaggacggtcggccgatcgtgccggtgccgaagtactactggaaggtcttctaccggccggagcagcgggagggggtggccgtggtcggactcaacaacccctaccgtgaggtggccgagggtgacatcctctgcgaggacgtctgccgcgcctacgagtggctcgactgggacaccaacaaccaggacaagggcgtcatgtactgctgtgccctcggcgagttccagcggaaattcatccacctcggattggaggagtcggagacggtcaccatccgctcggagggccaagaggacgaggaggatgagcagggagagcgcgtcgttgaatcgacgactttcaagatggagtcaagctcaagcagcccgattcttggatccacacacctacagcacaagatgtag

SEQ ID NO: 102 - RNA, 1206 nt, Bemisia tabaci
  source 1..1206: mol_type = mRNA
atgcatctcctttttgggctctgtttcttgcccctcctctccgccaccctcccgccgacacgcccatcgcaaaactttaaaatcgaagagcttggtgacgaagagacagcgagagacagcgtccgcggtgacgtcagaaaacgtcaagcgcaggctattgactttcaagaatgcgcggctccaaataatagaactgggcactgccgtcacctggaggattgcctgataccggagtacacagagacatatagagaaaacatcaaacatttttgcgtcatcgatgtcaaaaatgctctctacgctggcgtgtgttgcccagacgacacggcatcaaagactttatcgactcgccagattttatcacgggagagcccaatcgattcgaggatcgtcaacagcgcgcaatcaaatctcgcccaatcgaatctttgtggtagcaatgggaaaaaaacagacagaataaatgcaggagaggctaactacaacgactggccatggatggtcgccctcatgcagtacaagaaattcaagaggtcgtgggttcacttctgtggcgccgtcctcatcacagaaacacacgtcatcagtgctgcacactgcttcaatacactgaaatggcaggacattatggtacgaataggggcttacaatttcaaaaaggcaaatgaattcccttacactgactacaaggtaagagcggcgaaaatccatgaagattacgataaagctacaaatgagaatgacttaattatactaagcttggaacgtccggtcaagttcaacaagatggtgcggccagtttgcctgccgagccctcagtcggaagatgttaccacgctcgtcaatcgaactgctgttgtcgcaggttggggtgccacatctttcgggggaccagccagcagcaccctgctagaagtaagtgttcctatttgggagcatgaattctgcaaaggccagttgacgcaagtgatccacgatacaactatatgtgcgagtgcctatgaaggaggcagggatgcttgtcagggagactcgggtggtcctctctttttccagcgtactgatggaagatggacatcaattggtgttgtgtcttggggagttggttgcgcagcaaaaggaaaacctggagtgtacactcgccttacaagctacctgccttggattgctcaggcccaaaaagaaatgggagtgttcaccagttga

SEQ ID NO: 103 - RNA, 1602 nt, Bemisia tabaci
  source 1..1602: mol_type = mRNA
atgctcaatcacacaggaagtttgttattgcaaacaatgctgtatttggcaaactcggaattctcatctctggaattggacaacggaacagttttacaaccacaaactgacgtaacggcaaaatgctacggcgagtacgggtgttactcgataaactacccttggagtgatattctgagaccagtggcgcagtttcctgaatcgccggaaaaagtaaaccccaagtactgcctatacactcgacgcaacgccgactcgtgcgagctcttagaccacaaggatccacttacgatgtacaagtcttatctcgtccctacacatcgcatttacttcatagctcatggattcttggagagtggggacaggccttggataaagaaactgacaaaagcgctgttacacaaaggagatgtgaatgtaattacggtggattggggatcagggtcgatgcccccgtatgcgcaagcggtggctaacatcagactggttggaaggatcactgctcatctcatccagacaatgagaaaagagttgggagttcgcgtggaatattgtcacataatcggacacagtttgggcggtcatttagccggttatgtgggtcatgctttgcaagagcagtttggtgtgaagttgggaagaatcaccggtctggatccagctgagccgcatttcagtcaaacagcccctgaagtcagactcgactctacggacgcctcatttgtcgatataatccatactgatgccacgcctttcatcaaaggaggtctcggaatggatgagcccatcggacatttggacttttatccaaacggaggtgaaagccaacctggttgtgatcagagcatgtcaaaattgataaatgatgagaagggcagttttttcaaaggtttgcgccgcttcctaaactgcgaccacgtgagaagctacgaatattttattgagaccgtcaatacggacccgcagtgctcatttcttgccgttgagtgcgagtcatgggaaaattatcttgcgggcaactgcttcggatgtgatcagaaagatcgcatgtgtgcaacctttggttttaattcagttcactcgatacaaaaaattgctgccacaaggcactcgattgtaccaagtccgacaaggaaggaggtcaagctgtttttaatcacaaatagcaaagaaccattctgccaggctcaatataaggtcacagtcatgatatcgaactcaacccaaagtgtggaacatggaggcgagatagggctcttcgaaattgaaataatgggagctcttggtaaaaccaaatcaatcccactcttcagggagcagtattataaacctggaggtacttataccggggtggtggcagatgtgaacgtgggacacctacagggggcaattcttcattggcagcatcgcaccacgttcaatatactaacctggcgattcgacaatgttgtcatttatgttaaccgagtcatcgttgaaagtttacatcccagtgaaaggcttgagctgtgtccagaaggtagcagtgttttagtgtccgggcgttcaacaaatctcaactcttgcgtattttcaccggagccagaagttaaagtgagctga

SEQ ID NO: 104 - RNA, 1059 nt, Bemisia tabaci
  source 1..1059: mol_type = mRNA
atgaccactaaacagatactcgtgaggcagatgtcgctgcaggcgcggctgaagctgcgcaagagccaacggatatggttctttctcctagccgcggggacgttaatcagcctctccctcctgttcggcgcccggcggcatcggatccacctctcccagtttctagcacctccttacaagggcccaccccccgatgacctctgggcgaacatcaacaacgaaacaggagccgccgagctcatcgtcccgaacatcgtccacttcgtgctcttcgaggacccgaagatcagcttcatgcacttcgtctgcatcctggcggcgctgcggaaccagcgcccggagaagatctacttccacgggaacgtggcgccctctggcgggtactgggagcggctcatgaagttggagcccttcaccgagcgcctggagatgcggcgcgtggagctgccgacggagatatccggggtgaagatccagcccgggtggcggatcttccacggaggtgacgtcacccggatccgggtgctcatggagtacggaggcatcttcctcgacagcgactcgtacgttgtcaggagtctcgactacttccgacgcttcgagatgtccatcggctgggatgaaaatcagttcctcggttcccagatcatagtagcccacaaggacgctcgtttcctgtaccactggctgcacagctacgacggtgcgtacgacccgaaaaagtggtactacaacgccggcgagctgcctaccacctcggtcctctatcaccacccggagctcgtccaccgcgtcaaggtcctcttcggcaacgacatgaagttcatccacatgctcttcagcaagtactggccgggctggcgggagaactacaccttccatctcctcgccagacaccagtacttgctcaaaaacatctcctccgtcgcctactaccccgtcgtcttcgacgagttcaacctccagcactaccccatcaccttccgcgagatggccaacgaggttctcgattacgagaagcaactcttggggaaacctatcaagggaccagcaggctga

SEQ ID NO: 105 - protein, 777 aa, Bemisia tabaci
MYCCMMPSVPLNKESLKLEEINQNDSGISPSYCSGDSRGSAQSPASSAEDCGISTRSPPPLLSIKDQKPLSLDLSAPKSPQPAVALSQSQINLIRSLTFAARSASAAANRDPSRDSPRSTHNESPQENSSRATPDRTLHGTSFEAASNGTSHGTSFEASRGTTFEGTSYSSSFGGGSAFGALSGGTPQGAPFGASNGGSASPVAFQVERAPLGSPRLNAHDSSRSMSPASSVDSESYQDREHPLQQLALVVKRNDMLMPAPPETAETNSSDKTLIHCPLCNYTTNSRSTFNAHLHAHEGQKCCYICELMTESVEELRQHYQNVHDVNVSADFLNHSSGGEEEQGITVPKLNSQGKVKKHRCKQCGIVCVTKLEFWEHCRGHIKQERLLTCPKCPFVTEYKHHLEYHLRNHFGSKPFKCTQCSYSCVNKSMLNSHLKSHSNVYQFRCNDCSYATKYCHSLKLHLRKYKHAPAMVLNPDGSPNPLPIVDVYGTRRGPKQRPKKHESPKKIQTTQYSNQTAFPNQTPPSSQMTYSSPAFPTQPKFLSTQTHFPPSQFLSVPPSVPTILTPNSYSPTRSTLSPAPLSPVQPRLASQTLSPSQRQSPNPPLSSPQTSPTQFPNPAFSSQPYSMFPANYGLYPPFYPLVPNFPLSSLPLLQLDIPALLEEAKRSTETLNKLKELLQSNNNNSQYISKAVAQQIIDEASCPSTPASDVNSAPLDLSKSSGNDGNTSASAGSNRRKGKAVKRVPVHSMYYDDSDGERSPVKFSAPGMLPGAQKIY

SEQ ID NO: 106 - protein, 484 aa, Bemisia tabaci
MLIPRCHLRQYYAAAIASLSAMMTGAAMGWPSPVLEHFCEGAHCEVRMTAGEASWVLSLIEIGNLFSPIPCGYLVDMYGRQPCLFATGPLFLGSWTLIICSRSVGYLYLARLVQGLGMGIVYTVTPMYISEIAGADVRGRLSILFVGLLNLGILLEYIVGPFVSYRTLGYISISVPILFIATSIWLPESPYFLLMNDKSKEAINALMWLRSDYSKDRIFEELTLIKDEVEQEKGTKTAAKNTFGDIFSSAANRKAFLIVQIAACADVLSGMTAILAYASVIFAAPHNTTMEAEDYPIMLGLIMLLAIFPAAYLVDMAGRRPLLIFSCLFSGLFELVAAFYFYAAMKLDCDVARLKWIPLLAICAFSVAYSMGLGSLVPTLMGECFPSQIRGPASSMTSITLCAISFLVIKFFQVVNEEIGLYFNFFIYGVSSIACSAVLWLVLPETKGKTLSEIQQDLKASCKPSKPSLPLYVNASVPKGVEAS

SEQ ID NO: 107 - protein, 964 aa, Bemisia tabaci
MANSVEQPCYTLISLPSDSEFPNEMQLKSDLEKGDLRTKIEALKKVIYMIANGERIPGLLMVIIRFVLPLEDHTMKKLLHIFWEIVPKTLPDGKLLQEMILVCDAYRKDLQHPNEFVRGSTLRFLCKMKEPELLEPLMPAIRTCLEHRHSYVRRNAVLAIFTIYRNFEFLIPDAPELIANFLESEQDMSCKRNAFLMLLHADQERALTFLASRLDQVSSFGDILQLVIVELIYKVCHANPGERSRFIRCIYNLLNSTSPAVRYEAAGTLVTLSSAPTAIKAAASCYIELIVKESDNNVKLIVLDRLIVLKEHPAHERVLQDLVMDILRVLASPDLEVRKKTLNLAMDLVSSRNIEEMVLVLKKEVAKTHNVIEHEDTGKYRQLLVRTLHTCCIKFPDVAATVIPVLVEFLSDTNELAATDVLVFIREAIHKFDNLRPLIIERLLDTFSTIKSERVHRASLWVLGEYTNSPDDIQSVMAQINKALGEVPIVEDETRRAAGEKGEEVEHSKITSSGTSTPKLVTSDGTYATQSAFNTTTNTKKEERPPLRQYFMDGNFFIGASLGTTLTKLALRYIELVQDKVKQNKFLSEAMLIIASILHLGKSGLTTKAITNDDADRLLVSLRVLSEKAPPIVGIYTKNCRQALASMLVAKAEEEASSQKAKEKPGNQVQTDDPINFMQLSTTRGGEFGATENVFELSLTQAVAGNLSGSSQDTHSPLSASKLNKVTQLTGFSDPVYSEAYVHVNQYDIVLDVLIVNQTSDTLQNCTLELATLGDLKLVEKPQPVVLAPHDFCNIKANVKVASTENGIIFGNIVYDVSGASSDRNVVVLNDIHIDIMDYIVPASCNDIEFRVMWAEFEWENKLSVNTNLTDLHEYLHHLIKSTNMKCLTPEKALSGQCGFMAANMYARSIFGEDALANLSIEKPFNKPDAPVTGHIRIRAKSQGMALSLGDKINATQKRPVKAC

SEQ ID NO: 108 - protein, 612 aa, Bemisia tabaci
MYKIAFISVIFSLVFNYYHALNVDHKQLDWWQRAVFYQIYPRSFKDSDGDGIGDLKGIAEKIWYLKDLGITGVWFNPVLESPGLDLGYDISNFTNLDPLFGTMEDFQYLREALYKAGIHLFLDIVPNHTSDQHDWFLKSVKKIDPYTNYYIWKDPKIVNGQRQPPTNWLSEFGGSTWKWHEERNQYYLHQFHWKQPDLNYDCEELVQEMMDVVRFWLERGVDGMRFDAVAYLFEDPEWRDQELLSPDLDPTNYWNYNRSRTMDQPNTYRLITRFREVFDFYTKKEGKTKVLMTEAYTTLDRTMDYYQFEGKPGAHMPFNFFFITHVSGRSPAKDYQKAIQGWMDSMPAGFWPNWVMGNHDNRRVAARYGSDLVDGVNMIGLCLPGIGNTYYGDEIGMDDTVIRFDQGVDPQACHGGPEWYSQKSRDPARTPFQWDTSLNSGFTTNRKTWLPVNSNFWRLNLKAQMQAGENSHWKVYKRLMSVRKTDTILYGDLETFVLTKYVFAFVRRLEGSEAYVVVVNLGSDSQSIDLLAFMSDLPDVLTVHTSSVNSQYLPNDKVSTNGFFLRPKASVLLTTAKEVPPPAYTDPANGSSTIHTVYFSFIITLFIYVFFS

SEQ ID NO: 109 - protein, 221 aa, Bemisia tabaci
MSFLAKVFGGKKEDKAPSTGEAIQKLRETEEMLVKKQEFLEKRIEKEIQTAKANGSKNKRAAIQALKRKKRLEKQLQQIDGTLSTIEMQREALEGANTNTAVLTTMKNAADALKAAHKHMDVDQVHDMMDDIAEQQDVAKEISEAISNPVAFGHDIDEDELEKELEELEQEELDKELLGTGPSPALPIVPSAEPAKVADKSSGKKKEEDDDDMKELQQWAS

SEQ ID NO: 110 - protein, 107 aa, Bemisia tabaci
MGLGDYPLEYDRKVHGPYDPARYYGKPDTYFSEVKLGELGAWFGRRNKSPSAVVGALSRAYWRWNRRFNHCRIGNAAYPLQVIIGGAIIGYLINYPRTQNHIYRKYH

SEQ ID NO: 111 - protein, 460 aa, Bemisia tabaci
MTLFSPLNFKPSSVKHLYQLSSIVPAPSLFSYCLENVLRTNPDSFLRCFCAGPIAVYDSKVNEKEIEYNEQQKKVATSLQRVYEEIQSYSPPKKGFFSKIFKEKSRAPQGVYLYGAVGGGKTMLMDLFYSCVKMEKKKRIHFNAFMVDVHKRIHEVKKTVVKDPRETKPKPFDPIRPVALSISKDVWLICFDEFQVTDIGDAMILKRLFTELFDNGVVMIATSNRPPDDLYKNGLQRSNFVPFIQVLKDHCEVVSLDSGVDYRRRTLAGAGKHYFVKNQDDAEKAVENIFKQLVANENDIIRPKTLTILGRDVVFQKVCGQILNSTFAELCDRPLGSSDYCMLAQIFHTVIINDVPQLTLKNKSLVRRFIMLMDTLYDNRVRVVITADIPLDQLFLMKKSDGIGDHDRVLMDDLNISSESENAVASIFTGDEEMFAFDRTVSRLIEMQSEEYWNQWDKQR

SEQ ID NO: 112 - protein, 275 aa, Bemisia tabaci
MIKAISRGGQFGAFSKATAQAIPPPSASVLVPATLPPSSKPLVEIDRSLLTSDSLGKAVSSINNFGVISGPGVTTQVRFAHTDVKVPDFTAYRRDSTKSPTSDNDKSLGSRAAFSYLFTAGSLAGAIYGGKGIVHAFVTSMSASADVLAVSTIEVKLSAIPEGQCVTFKWRGKPLFIRHRTQEEISRERAVPLSDLRDPQEDEVRVQKPEWLVVLGVCTHLGCVPIANAGDFGGYYCPCHGSHYDASGRIRKGPAPLNLEVPKYAFTDPDTVLVG

SEQ ID NO: 113 - protein, 424 aa, Bemisia tabaci
MDPAKSRTFEYPDFWTDAERMNALYAPFRNRNVNPLNFDTKLDFWKKMIEKWCLFQSNPLFSIKDIQTFFQRDTRRPLCLALVVDDLLKNKEIKSVDEFLQETPPEQSWSGWAVHSLVKSPARWAFTKLKTNVFASNSTVQEDTEFVHLPSLKVLAENILKSVEFDHLYDIEELKDVMKNEQPFSLTIVNLIVHYLSLQSKAIKTVLDGKTLVKFVSDKGGQSLTISKEEEATYTLQSQERFLIENIEQLEMEKENLVKEAKSYLDRGLRKLAKVHLRKKMELEKTIEKRVLILENIQSLMSRVKEVDSNSQVFDTYQQGVFALESKIKEAGLNIDKIDDTMGKIEQALEDNDEIESTLSKVINSPSDAEYEAELAALLLDELAPVPDHSPTHLPSSLIGNQVEDMGTSEVAHKPKKVAAEATG

SEQ ID NO: 114 - protein, 578 aa, Bemisia tabaci
MVVVLREAGVPAVLSGTPPHCKTGIPRHTDWDINDSTIPRVVEYNGWEEWADGHCRLVYRANCEEARRHASGWAMRNTNNHNAQILKKSCLGVLVCSRRCVLPNGDSVHLRPAICDKARKKQQGKPCPNRQCTGRLEILACRGHCGYPVTHFWRHTDHAIFFQAKGVHDHLRPEAKSTSEARRTLGAGRRVRNLAVLLARDAALSSKLLSVKDRDRNRCEIERLRIPQPPPVSDSEKVYSCSCPPFECVCQSRFQSFNWHQSNQETYWMSENVQPVPNQIIESDTNNYLPESNATNLNTSSNNSNNNNNNNNTNNNNNNNNNNNNNNNTVPYDFPPFGNDLFPADELFQLEQPMRASYRGAPEEDKCSPTVLDLGSGTIHRTTFKSEPDAEPYWLTAATPSVHTDDSNCSQMKQFSPNHSYMTNLADTDVDDSSEMSTHHLSPGAQPPKSGTNFHLLNAEEIPFQYVSCDSYRMDQCVNQYRSCDAPEEFNFACTMDASVQYPSEQLTSLDSTMMTTYPARTGYGQPTHDLMVQTPHSCDEFISLADFRLPQPSTVLHHETYLPSNAHSCQTPGYCHQ

SEQ ID NO: 115 - protein, 277 aa, Bemisia tabaci
MVYSAMDQVVPNEYLRKAEDFADLVYKKTKVFLPTASRLCLISTFIEDGLRMYFQWTQQKEYMDMSWGCGSFLATLFVFINLVGQLGGCVLVIVQKQVPAACGVLFFIVVLQTFAYDILWDLHFLLRNLALIGALLLVLADSKAETRTLLAGVPTLDTNKPKNYLQLGGRILLAFMFITLIRLEISFFQILQDLFSSALMILVMIGYKTKLSALLLVGFLSFLNFYHNAWWNVPSYKPLRDFLKYDFFQTFSVVGGLLMIVLRGPGGVSMDEHKKDW

SEQ ID NO: 116 - protein, 555 aa, Bemisia tabaci
MHFAQSHSLLRCKCQQFFPSCRNFLKTRIFDKNNSFANVTEGLKHLYKTKLLPLEEKYFFHDFYLPKITDQDFDAKPMILLMGQYSTGKTTLIKYLINGDFPGMRIGPEPTTDKFIVVMHGEKEGYIPGNALVADSSKPFTPLSSFGNSFLNRLQCSLSSSPRLGEISFIDTPGILSGEKQRIDRGYDFTGVLEWFAERVDRIILLFDANKLDISDEFRRSIEILKVHDEKIRIVLNKADRIGHQELLRVYGALMWSLGKVLRTPEVSRVYVGSFWDQPLQNDMFRKLFEDEEMDLMKDIQSLPRNNTLRKLNDISKRARLAKTQAYLIAELGGQMPTFNIFSNKAAIQENLIDNLASMFQTIQGRYRLSPGDFPQLEKAQEKLRAYDFSKFPSLNEDLINAVDEMMMKDLPQIMSNIPAEESKQNEFLTSAGLENTPFGYDQGVGINEGKSERGWVVEKYRQKYDSIYDSLAHNDNKIVVSVAREEMMKSKLPSNVLGKIWNLADVDGDGVLDRDEFALSMHLIDIKLKGHELPDKLPEHLIPPSKKNHAPSRP

SEQ ID NO: 117 - protein, 730 aa, Bemisia tabaci
MTEDKPDKDKTEKTEVEWGSEKLCQAQAAINENPWDIESWGILIREAQTRWIHDVRPFFEQLVNTFPTTGRYWKIYIEQEMRGRNFEKVEKLFQRCLIKVLNIDLWKLYLDYVKGTKASLATYKEKMAQAYDFALDKIGMDINSFDIWNDYVNFLKSVEAIGSYAENQKITACRKVYQRGVVNPMNKIEALWKDYIAYEQVINPIIAEKMMMERSRDYMNARRVAKEFEAITKGLNRNLPSVPPTGHIEELKQVELWKKYIAWEKSNPLRSEDTALVTRRVMFAFEQCLLCMGHHPDVWYEAAQYLDQSSKTLSEKGDVNASKLFSDEAATIFDRATSTILKHSMLLHFAYADFEEGRMKYEKVHEIYKTYLELQEIDPTLTYVQYMKFARRAEGIKSARSVFRKAREDPRSNYQIFVAAALMEYYCSKDKNIAFRIFELGLKKFSHTPEYLLCYIDYLSHLNEDNNTRVLFERVLSSGSLESEKSVEIWNRFLEFESNIGDLSSIVKVEKRRSAVLSKIAEFEGKETAQLVDRYKFLNLFPCTPAELKAIGYNEVTQNIAKSFQAAKSGGPIISSLDVMDDGDAAQRNLPKPDVSQMIPYKPKRNAFIGEHPIPGGSFPPPPAVAQLMATLPPPGCFHGPFVAVDQLLEIFDKIQIPDKPPVPKGDNGCDTRLFDFTSSIHWMENDDSVLNSGIRRKRKAGGGDESDEEENVAPPVYDIYRIRQQKRVK

SEQ ID NO: 118 - protein, 586 aa, Bemisia tabaci
MALKTLVGQKIMNEAIKQKKKTGKDVEWRVLVVDQLAMRMVSACCKMHEISAEGITIVEDLNKKREPLPTMEAVYLISPCEKSVHALMNDFNYGSRTMYKAAHVYFTEACQEERFNKLCHAPVAKYIKTCKEINIAFIAYEQKVFSLDTPETFQCFYNPAYSSNRNANMERIAEQIATLCATLGEYPSVRYRSDFDKNLELAHVIQQKLDAYKADEPTMGEGPEKARSQLLILDRGFDCVSPVLHELTLQAMAYDLLPIENDVYKYEATAGAPEKEVLLDENDELWVELRHQHIAVVSQNVTKNLKKFIDSKRMPQGDKQSMRDLSQMIKKMPQYQKELSKYSTHLHLAEDCMKAYQGYVDKLCKVEQDLAMGTDAEGERIKDHMRNIVPVLLDKAVSNYDKLRIIILYILSKNGISEENLNKLIQHTQISPQEKQAIVNLANLGVNVVTDGGRKVKVYQPPRKERITEQTYQMSRWTPVVKDLMEDCIEDKLDLKHFPFLGGRAASSGYHAPTSARYGHWHKDKGQQTVKNVPRLIVFIVGGVSYSEIRCAYEVTNAIKTWEVIIGSSHILTPEDFLNNLANLSA

SEQ ID NO: 119 - protein, 489 aa, Bemisia tabaci
MSPTKQSQLNIHFRVTRSGTPKGKRNKENDNTPCKKPAPVATPYKLTSEAENYVHIDTPRPPKRPYSSSKQTAEDISPPKENGFKLARKVLHGSATSSLPGRDKELNEMRSFLESHLENETSGAMYVSGQPGTGKTACLTHLLTEEKIKSNFKIVSVNCSYMQSAVAIYGRICEELSLKVSGRSEKEYLTKIRKYLISEHKMILLILDEIDQLETKKQNVLYSIFEWPSLPDAKLVLVGIANALDLTDRVLPRLQAKLEKQPQLLHFAPYTKQQIIDIICERFKEGNISYLFDDNALNLLAAKVAAVSGDVRKALDVARCAVDLAENKSKSSVLQPSSNNVSSSSVASLDKIELKEVLTTINSVYGTSQVLNAVTGSQPSLPLQQQLIVCSLLLMMDHETKKLDITLGKLYDVFRKVCSKQRLGGVDLSEFISLCDLVQARGILKIHSKTRNRQSKVSLQWDKEELMAILQDKTLLSDILADKKVLYDK

SEQ ID NO: 120 - protein, 644 aa, Bemisia tabaci
MAYSVNISVEAPIESQIQEITYDGQEIYQAPLSMSENLAKMAQKIDFARVSPDTFKSEPMETDKPDDDAQSKDSAAFQAPQCLWDSVRSKLRNSLTELCVLQDVLTIAKEKRYMVLDPVPQEVPEQKPMAQIYARKKALSGAASVLLSAAERLRTSQTEMARNRTTPDFHIELLRLRQNWRLKKVSNAIIGDLSYRTAGSKFSQMGMFEVTKAEDDASTSQASSPPPSPGLGPPMPPKPPSALRVTVPSELQGVAYIMVLCRKDQEDLSVSANLLGSSAPSANPDVHWQQKLEAAQNVLFCKELFNQLAKEAVQLQGPIPHMVVGNQIMATVLPGIQLIIGLCHSGGGGESKRGIAPPPPKGDHDHVLEHSLHQLLREVHHKNTHHPFPHPSSGPLGPSKKRALAGPTAADRYQLLEMTKSKTMLEEMIEQTQHFFMRLRAEYVLDTIAKEVKDPLIVSHWNALNSPTQSCVKITIITHGYEVIGKSSLIVHVGQKSMKCVCRDGKVMHLSYEPQELRDLIFCQIHQHQINSVQALGRCMGWQHLANSPHLGIGPVEPLGNASSCILASPMGDRIIAIRCAPQAGPQVFIAHSPRKDFFSGQLVKERKWENLGGPFKEVRWDKMEGKNFLNKMELLMASLTSNS

SEQ ID NO: 121 - protein, 1251 aa, Bemisia tabaci
MPAEEKTSGKKLSNKEKKKLKLEEEFETKPAKSKKGRKHDDSDSEVETSQKPAVNDDEESQASGKPQKKLSAKEKRKLKKGQMDDFNDSDSISSSLSGVQKAKKLSAKDKKKLKDEEGFRSKEHKPTKGKKRDDDSDSDSNVKKSKSGKSGNVFASFIESDEDEPVASLAPKKSSAKEKKKIEKKKKKLESDDESDDFSISKKDSDEDSSATDRIGKIPKKLTAKEKKKLEKKKKLEESADESDDIDVIKKENSKKIEESDEDSDDSKPSLKKLSAKEKKKLEKKKKQAVSDDDSDDLDIIKKEKTKKVEEPDEDSDASKPVLKKLSAKEKKKLEKKKKQAVSDDDSDVDIIKQETAKKASDSDNEASTNAAPKKLTAKERRKLERKKGWEEEEEEQDEDVTKPKEEKKVEDVAEEKGGKKLNAKERRKMERQKQWDELGEEKKDVENVEDKAESKPVEVIEAAIENLQITKGKQKEKKKKKDGGKENEPDAELSSKESIKKDEKVESKTVNDVDALSASLDSMQLKAKEPKKLSAKEKKKLEKKEKIEADFKRQMGLLDTEEGEKKNDDEKLEIKEDAKKVEGSEADVNEEKVEKSKEKKKSKKEVKFSEPQEDHKDEIAEEEASKDESVPEISEEKGEKEKKLTHKEKKKLKKEMEYQKMMELTTKKGGQGHSELDSNFAVSQSLKSANQLAALENAVDIKIENFSISAKGKDLFTNATLLIAAGRRYGLVGPNGHGKTTLLRHLATRAFAIPPNIDILYCEQEVIADDTLAYEAVLKADVKRTELLKECKELEEKIEKGDLEAQERLNEVYEELKAIGADSAEPRARRILAGLGFSRAMQDRPTNSFSGGWRMRVSLARALFVEPTLLLLDEPTNHLDLNAVIWLDNYLQGWKKTLLVVSHDQSFLDNVCNEIIHLDMQKLFYYKGNYTMFKKMFAQKRKELIKEYEKQEKRIKDLKAHGQSKKAAEKKQKEALTRKQEKNRSKAPKADDEDKPTELLQKPREYIVKFSFPDPPPLQPPILGLYNVTFAYPGQKPLFINCDFGIDLSSRVAIVGPNGVGKSTFLKLLTGDLEPTKGEVKRNHRLRIGRFDQHSGEHLTAEETPSEYLMRLFDLQYEKARKALGTFGLASHAHTIKMKDLSGGQKARVAMAELCLMAPDVIILDEPTNNLDIESIDALAEAINEYNGGVIIVSHDERLIRETECSLWVIEDQTINEVDGDFDDYRKELLDSLGEVINNPSIIANAAVEQ

SEQ ID NO: 122 - protein, 288 aa, Bemisia tabaci
MASVLLNDAEKTFILHGVEVDLRCDGRRRGDYRPMELETDVVSTASGSARLRLANTDILVGVKTEIDVPYPENPEEGKLEFFVDCSANATPAFEGRGGEDLANEISSRLSRAYQSLPLAPLCIVPKQACWKLYVDILILECGGNFYDAISLAVKAALFNTRVPQVTGSFLDGGSVDLEVSDDPFQCWRLDITKAPVLVTLSKIGDNCVVDPTAEEETCSVASIVVAVLDSGSLTAVIKIGEGSVHEQTLIETIKTAQKIGVELNSSLMTALNQEESLGPKRQRFGFLK

SEQ ID NO: 123 - protein, 1640 aa, Bemisia tabaci
MSIMEMANTSSHWDDTLSNMSSCSSSLEESTTSSTYTSTSDEGEDYGVKMEECDLEGVRLLLPQELCEDPAIFKEMFNAGLWKSLSEENKRHLLNFFPSFPQNDMQEKSKTLQKLLSGEAFQFGVNPLTDFHEKLRAGNFSPDIARVRALLKRAQYKDYKQSQRRYYFQLMKNILLSRHRLLSAAASLPPGAPLPRLQPVGPASSSSTSSPIYQKVRHRYFKELESIKQEIGESSQSSEDESFPEGPPPKLNKKQKRQLLQLEQCLSPDMNPVTSTLVPKSTSFDLIRSVNSSCNPFEVTEDSYREMLLAHKRKKMNGVVKTKVPNRSQLKRPSSIDLHAKGGVVVNKKQNVRSSEPRPQKRAHKSKSSLMPVNPKISSLDIENCESEGDENALPSSTLLDIEGDSSSSSYLPGMPKSKSKTKSFTVESTSRDTGGRVTESNIQQSSRLPVGPPPMYPNLGSINMMDLPVDIDESSQIDVEDIKPLPELLKKTHPCYFSLIRDIFCSTWDHRLGLLPLREQLQQWSESSTSLLNSWYSLAKWTELLPSALAFLTGESTDCLPDEFVPYVEYKPACDAYQWIGAGRDSDARLLSLYHFWMERREKSSAQSNNLDVENVKEVKREPSPLPPPARCQTSWVVTPATPEERESFREQERRRFEQPHRAFTYRMHGYEAIVGPVRGMYNAAAGGKSPRGHSLLVHERPNYVTILTLVRDAVARLPNGQGTRADICTLLRDSQYLNTQVKDTDVQNVVSGALDRLHAESDSSVKYDSTRKNWIYLHRARSEADFELVHKEMQGMAKTKGPKKMQRVKKDSAAKEAGEGSSTTTVLSSKKADSVADIPSTPASPSMTKPKTIKTLVPNQNAIAAAAAAAASVATAEPTVPSIPAQSRPVTDPKPVLVKRSSVPKKPKLSQGAIMSKLLKEKSLNPVPKPLSKAKLKALEAAAKMETKNFNADDKSVVTEDVKPVKKVKSTPNKPNSTPTSDSMTIVANIVNKKQEGSGNTVLKVTNQGAGGRTVVGQTYVTPQQLMLIKQAHLLNKQQQQATSDAQKQPQMIVINQQQKVLADQLSLKHQKQLQQLLLKQQQQQKQLQQQQQQQQQQLQQQQQEQPQIQQQQQQQQQGQQQPHQEQQQTKQPQQAKQQPKQQVQQQLKLQQQQQQPKQQKQPQLQVVQQAQQPETQEASEAKPAPEPKPQTQTQQINLSSLQPAQIQQLLLAKQQLLEQQQKQGIITTAGGKQMIVLKQGQQLITADGKTIQQQQPMQQMIIVKGSSPDKTQTTTTISQQQLQQLLLKQQQQQQQQQQQQSEGKTSITTTVSQAQLQQLLAKQQFMVLKQQGKQGQGQIKLVPSGTTVSGQPQIKLTQTISTAQLQKMQPRIISTQKPLTPVSTTVQAISSTSSPLASGTNIIKPVQSVMTKVVSNAQTESVVTVGNLLANQKQQTVISSDGSIRVADKPSIGSHQYTVVSMGEGQSRVIQSTQLVQASTNLTNARNIATKTANLRVLQSPTSINLAQLAGKPVILSQKTQGIQGQNMVIASSSANTSGQQTILLPQSIKQPSGSNTVTVLQSGGVPQQILLPAGFQGGTLNIKALQGLKVIPVAQSTQVQKGQRQMFARIISPDSTTKIIPEQTNLNNSQVAEQSE

SEQ ID NO: 124 - protein, 388 aa, Bemisia tabaci
MSDTLTQRELGLLIIRFSLITVVSFVAFKWMLHKIDPTKKQKEEAKKKALANLKRLGMKTDTDLNDHEMMVAANLVGPNDIPVSWDDVAGLDNIIEELKYSVIYPIKLMRARPESRLTRPPKGVLLHGPPGCGKTLLAKATAREAGTNFINLEVSLLTDKWYGESQKIAAAVFTLATKLQPCIIFIDEIDSFLRSRTTQDHEATAMMKAQFMSFWDGLLTDPNCTVIVMGATNRASDIDAAILRRMPTVFFIDYPSTTQRQKVLGLTLKGEQLASDVSLDVLATKTDGFSCSDLYELCRKAVSTRNQKAFQSYVKSQENGGIFDSRNQSKEDSSKDLSSSQSSKSPSSKSERPSGDAEFVNIRISPLCMEDFEKSLVKMKAARSIFQS

SEQ ID NO: 125 - protein, 316 aa, Bemisia tabaci
MRNKRCRLLCTESFKPPEILKQQLGNDTHPGAQIPFYNRMAKIKFGTNAHTLDMYIRNMTDIFPARSYNWARDNHDNPRMTSQFYEESKDSWNMLLLLLPGVPTIYYGDELAMLDSNVRQDQEQDPQKRGSFRDKPRDGCRAPMLWDDSKNAGFTTAKKPWLPVHPNYYHTNVEAQRRDPDSHLNIFKRLVDLRGTPVYLHGDLQTFVPKEWVYMFTRSTKAETIAVLMNLGSETEEICARHSATHLPETMFVHTSSVNSRLKIGDKVKTTDVDETKCISMRPQSGLVLSTTSSDGVKISCSAIVLILVASFKVIL

SEQ ID NO: 126 - protein, 693 aa, Bemisia tabaci
MMGGLMLAEVWLVTSILVVLSAGKSLLRHARHQLDPPASNMDFDHLPLRASPETDQLRNPRHGFGFRDGISDEGLNFRHSEHEGERSKYKGAEAEEEMMADEGDNDPLVVQTTKGKVRGTTLTAATGKQVDAWLGIPYAQKPIGALRFRHPRPIDKWEGILNATKMPNSCTQIVDTVFGDFAGSAMWNPNTPMSEDCLYINVITPKPRPRNAAVMVWIFGGGFYTGTATLDIYDYKILASEENVILVSMQYRITCLGFLYFDTQDVPGNAGLFDQLMALQWIRNNIHAFGGNPHNITLFGESAGAVSVSMHLLSPLSRNLFSQAIMESGSATAPWAIISRQESIIRGLRLAEAVGCPHTRAQIPEAIECLRKVNASVLVENESGTLGICDFPFVPVVDGSFLDEMPSKSLATKNFKKTNILMGSNTEEGNYWIMYYLTDLFRKEENIHVSRDQFIQAVSELNPYNFIVRRAIIFEYTDWLNPDDPVKNRDALDKIVGDFHFTCNVNEFAYRYAETGNTVYMYYFKHRSTSSPWPTWSGALHGDEINYIFGEPLNPTKKYQPAEVELAKRMMRYWANFAKTGNPSLSSDGSWASVYWPQHTTYGREFLTLDINSTAIGQGPRLRQCAFWKKYLPQLISTTSYLVPANSSNCTSAAPSSLLQHGFNKLSSHSSPFILLLAVFQFLLLLLSNSAIL

SEQ ID NO: 127 - protein, 588 aa, Bemisia tabaci
MVNSVEDVFDDAENEIGDSSPVRNKIDTNIDEPKSKPQIECKECKSYVYCQGPLLYDYQFSGLFNDSKTFVDKRLLFPEEEIVRKYTALKKSRGGELSRAELESFLAENFADGNELIPFEPPDFTSEPSVLGYIQDGQYRRFAAKLNEVWKTLARVVDRDVLENPRMHSLLYVPNTVIIPGGRFTEVYYWDTYWIVKGLLLCDMFDTAKGVIDNIIYLVKKYGYMLNGSRNYYENRSQPPLLIPMVAAYYQLKQDEAWLLENLPVLELEFQFWMNNRMINVKKDGKTYRMAHYSVETCGPRPESFKEDFTLASNLTSDEERTNLYIELKTAAETGWDFSQRWTKTPPGQTESLLYLKTRSIIPVDLNAFLQLNAHYLSNWFFMAGDISKGEYYLQIAEELLTAIDEVMWREDLKSWFDWDNEDGQSRVDFYASNLTPLWTGSYRKAPQEMGKFAVEYLVSQGIISEDGIPRYLGIPTTLKNFGQQWEAPNMWPPLQMIGIQGLDNTLYPKAQQVAYRLGAKYLETNYVGFVRTGQMFEKYDMNQLGSIGGGGEYVPQTGFGWSNGACFEILSRYGHKLRSPQEYPLPN

SEQ ID NO: 128 - protein, 262 aa, Bemisia tabaci
MEDISSSGEEISMKAISKVIGVPDIRDGPTLTKCIVAEFVGTLLLVLIGCMSVAFVHQDNFVDVVKIAMAFGLIIASMVQAIGHVSGCHINPAVTCGLAVSGHVSIIKGMLYIVAQCLGAICGAIILNEITPKTGYTAAGNLGVTTLSTGVSDLQGVAIEALITFVLLLVVQSVCDGKRTDIKGSIGVAIGFAIACCHLAAIKYTGASMNPARSLGPAFVSGIWDKHWVYWAGPILGGVTASLLYAITFKAKKRSDESSYDF

SEQ ID NO: 129 - protein, 864 aa, Bemisia tabaci
MGTLFRSEEMALCQLFIQPEASYTSVATLGEAGVVQFRDLNAGVNSFQRKFVSEVRRCDEMERKLRYIEVEVSKDRIFVPESNVCPPAPNAREITQLESHLERTESEILELSHNAVNLKSNYLELTELKYVLEKAHAFFQESFCLKQQEGASGSGNNDSLTKALISDESQQQSSRGRLGFVAGVVPRERVPAFERMLWRISRGNVFLRQAELEEPLEDPATGNEIYKTVFVAFFQGEQLKHRVKKVCSGFHASFYQCPSSHTQRQELLKGIKTRLADLNLVLNQTRDHKQTVLRSVAEKLHGWTVQVRKMKAIYHTLNLFNMDVTKKCLIGECWVPVNDLTFIRKTLLDGSKAVGSSIPSFLNVIETNENPPTFHRTNKFTEGFQNLIDSYGIACYREVNPALYTIITFPFLFAVMFGDAGHGAILAIFGGIMIYFEQMFLKKKSNNEIWNIFFGGRYIIFLMGLFSIYTGIIYNDFFSKAVNAFGSSWFSNYNESTILSNSDITLDPVYQYKQYPYPIGVDPVWQISSNKIVFFNSFKMKLSIIFGVVHMIFGVMLSVINHIHFKRKMSIILEFLPQLILLILLFFYMVMLMFMKWTLYGPQNPLKTSPRCAPSILIMFINMMLFKNNEPFPGCDEYMYDNQEFIQRLIVFFSFLCIPVMLFGKPIYLIYFANKPTKRHFSSNGEAHQGIELQESRNMDVETDVVTAETQETLETLMAQTETEQDVQPVEEHEEPSEIFIHQVIHTIEYVLSTVSHTASYLRLWALSLAHAQLSDVLWGMVLKIGLQRESHVGALVLFIMFALWAVFTVAILVMMEGLSAFLHTLRLHWVEFMSKFYTGTGYAFQPFSFKHILESEEYTCNEE

SEQ ID NO: 130 - protein, 1264 aa, Bemisia tabaci
MIFALIALSSAVKAGVTLVGASVWLVPLLIAAIAYYRYDMFDPESRIKNQVQLNREYDFIVIGGGSAGAVVASRLSEVPHWTVLLLEAGPDETEISDVPSLAAYLQLSKLDWGYKTEPTGRGCLGMKSGRCNWPRGKVLGGSSVLNYMLYVRGNRQDYDNWEALGNPGWSYKDVIHYFLKSEDNRNPYLTRTPYHRSGGYLTIQEAPWRTPLVVAFVAAGEEIGYKNRDINGAEQAGFMVAQGTIRRGSRCSTAKAFLRPARHRRNLHVAMGAHVTRILIHPHTKRAYGVQFVRDGIHQAALARREVVLSAGAINSPQILMLSGIGPSEHLHKHGIPVVADLRVGDNLQDHVGLAGGLTFTVDKPVSIVQNRLQAVPVTMSYVVKERGPMTTLGGVEGLGFVNTKFANESGLYPDIQFHMAPASINSDQGSQVRKILGITDRVYDLVYKPIGSKDSWTIIPLLLRPKSSGWVRLRSSNPFEYPYIDANYFAHPQDIATLVEGVKIALQVNAASPLRQFNSRLHRIPIPGCHRLAFGSDAYWECAIRHLTMTIYHPVGTCKMGPSSDPTAVVDPRLRVYGVSHLRVIDASIMPNIVSGNTNAPTIMIGEKGADLIKEDWFSGAFAPTVFQMVPAGKLFLEVAFGILTLCSFENGFSMGQYGPNESQEQLRLFEGLGAVFLDGERFYRSEPPETRRILSAYDFIIIGAGSAGCVMASRLSEIPDWKVLLIEAGRNENYLFDIPLATSFLQLTDAINWNYTPEPQANGCLGMKGGRCAWPRGKVMGGSSVLHSMIHTRGDRRDYDAWANAGNPGWTYQELLPYFKKSEDMQIPELQRDTKYHSVGGYFTITYPVYHTKLAEAFVRGGKQAGFNISDYNAESISGFSYIQATIRNGTRLSASRAFLHPVRNRPNLHVLKNTLVTKIIIDEETKKVRGVEFVRNSQRFRVKATREVILSAGAVNSPQLLMLSGVGPQDHLKELGIPLLKDLPVGYNLQDHIALGGLTFLVNSTVSIKMERILRSAKALNDYALYKRGPLAVPSGSEAIAFIDTKRPFDPDGYPDIEFLFIGGSYPSNPLHRYIFRIEDTLYNKVFLPIQNQDAFMVFPMLMRPKSTGRVMLRSANPMAKPLLFANYLTVQEDVDTLVRGVRWMQRVAETPAMQKYGAKIHSIPIPQCEHFGFDTDNYWGCQAKHLTQTIYHLSGTCKMGPESDPRSVVDARLKVHGIKGLRVIDASIMPDVVTGHTNTPTIMIAEKASDLIKQDWMRLQ

SEQ ID NO: 131 - protein, 202 aa, Bemisia tabaci
MADKEKKTKKKKKEEPKEEAPPPKEPTPPPPEPEKPVSVKKKSSSKKVKRSGSNVFSMFTQTQVAEFKEGFALMDHDKDGIIGKNDLSQTFDQVGKLVNEKELDAMLEEAPGPINFTQLLSLFAARMSGGSDDDATVINAFKAFDEGGMINGKALRHALQSWGDKFEKKEVDEIYDNLDLDDKGYFETDEIIQLLLGSSEDE

SEQ ID NO: 132 - protein, 1517 aa, Bemisia tabaci
MKSKSVTFVMAMLPGAKQLFCVVIWTVFSLFILGSYAERRYAYTEKQRYDGWFNNLAHPDWGSIDTQMTRKTPPAYADGVYMMAGQDRPSPRRLSTIFMKGDDGLASAKNRSAILAFFGQVVSSEVVMASESGCPIEVHRIQIDKCDEMYDPDCAGDKSIPFHRAGYDSKTGQSPNNPRQQINRVTSWIDGSFIYSNSEAWVNAMRSFVNGSFKTDPTGKWPVRNTMRVPLFNNPVPHVLRTLSPERLFLLGDPRSNQNPALLTFSILFFRWHNVIAKKVQEAHPEWSDEEVFQRTRRIVVATLQNIIAYEYIPAFTGLELPEYEGYSIDVHPGISHVFQTAAFRFGHTLIPPGIYRRDSKCNFRKTPKGKPALRLCSFWWDSNDAVSESSVEELLMGMASQLAEREDTVLCSDVRDRLFGPNDFSRRDLGALNIMRGRDNGLLDYNTIRTYFHLPKVTSWKDINPTLLGKHPELVKKMSDAYGGSLDNVDLYIGGMLESTDGPGELFSSIIIEQFTRLRDADRFWFENKDNNIFTEEEIADLRRVTLWDVIVNSTDVPPDAIQKNVFFWNDGDPCPQPAQLNASQLEPCSYLKGYDYFEGSELAFTYAIVFLCVVPLICGAAGYGVVKLQNRRRRQLRMRQEELKSGPVKTSGLATVDKMAVREWLHANHRRLVKVRFGPEASLHTVDRKGEKLRSVNFKNADTITIEESLVDERGKRKRPMVLIRVPRDHDLVLEFDSSAARRKFLSKMEGFLNSHKKHLIVVQAPRELMLAKAETRERRQKRLEHFFREAYALTFGLKPGEKRRREDEGGEVVMRTSLSRAEFASALGMKPDAVFVRMMFNIVDKDGDGRISFQEFLDTVVLFSRGKTEDKLRIIFDMCDNDRNGVIDKGELSEMLRSLVEIARTTSLSDQHVTDLIDGMFQDAGLESKDFLTYDDFKEMMRDYKGDFVAIGLDCKGAKQNFLDTSTNVARMTSFHLDPSLDEDRSWLKKNWDCLTTFLEENRQNIFYLFIFYVITISLFVERFIKYSFMSEHTDLRHIMGVGIAITRGSAASLSFCYCLLLLTMSRNLLTKLKEFSIQQYIPLDAHIQFHKVAACTALFFSLLHTVGHIVNFYHVSNQPLEHLQCLTSEVHFPSDYKPGITFWLFQTITGITGVLLFVVMVIIFVFAHPTIRKKAYKYFWAAHSLYVALYALMLVHGLARITGPPRFWMFFIGPGIVFILDKVVSLRTKYMALDILETELLPSDVIKIKFYRPPNFKYLSGQWVRLACTAFRQSEFHSFTLTSAPHENFLSCHIKAQGPWTWKLRNYFDPCNFNVEVDQPKIRLEGPFGGGNQDWYKFEVAVMVGGGIGVTPYASILNDLVFGTSTNRYSGVACKKVYFLWICPSHRHFEWFIDVLRDVEKKDVTNVLEIHIFITQFFHKFDLRTTMLYICENHFQRLSKTSMFTGLKAINHFGRPDMSSFLKFVQRKHSYVSKIGVFSCGPRPLTKSIMSACEEVNKGRRLPYFIHHFENFG

SEQ ID NO: 133 - protein, 599 aa, Bemisia tabaci
MPSLSILLLSLLCCSNLQVIQTTPVLDWWETTVIYQIYLRSFKDSDGDGVGDLKGVYEKLDYIKETGFETVWIQPFFKSPMADMGYDVANYKEIEQMFGTVQDFKTLVQGIHDRGMNIIIDFIPNHTSSENEWFKLSENRIEPYTDYYIWHNGKRFNDTHVTEPTNWLHVFNGKAWTWSEKRQQYYFHQFSPKQPDLNYRNRNVQREMEDVIKFWLDLGVDGLRVDAVDYLYETDILLDEPELPPGPGVSGYESLKHIYTKAQPENKILTHSWRLVMDEYTKRDNKTRLLILEQYAPLKQLVAFQGNSTYPNAHISLYFPLIFYSHEQNATVLDGIIRGWSDIQPDNHPPNWVIENHDRYRVDHRKGAEFIDAMNMIHLLLPGVAFVYYGAELAVEDNWTIRKGQIRDPNNYGHGITTSRDPSRTPMPWDDTKNAGFTRNQKPWLPVHPNYWRKNVKSEQKESKSSYKIFKRLLALRRTPVIKYGKFQTFVMSEWTYMFTRSTSRDDTVAVIINLGTETEEVCAQNFAVGLPDIMTVYTASLNSGFDVGDRITTSRVNGGKCAELRPKAGFVLSVNSGSSLLCSAYLIPLLVFFFFLYT

SEQ ID NO: 134 - protein, 1334 aa, Bemisia tabaci
MANFTVGSRVEVTGKDVQGTVAFIGPTSFSQGKWVGIILDEPKGKNNGTIKGKQYFQCPDNYGMFVRQMQLTLIDESGNRIDMANSGSTSLTSLDDSTSSKLTPPGQRSRLSSSRLSLASSKSGSTPSRSKEDVRLSTGTLADSSLSDNSTPSEAKSANGQQDPPSLQKRASFVEQSKNSPSTPKTSKLTSKLVAPKVRSKFSSPKIQANTSSSSNVEPNSNSLDQQTGFVETLKPQFTPGQVMQPASGPASTQRPPPGPVIDPAEHEALKSQVKDLTEKLDTMRLKHKEKTQTLEAMKIQLDQAAEFKIKIIESQANLKKDIERLKKEKQDALEAKNEFSDLAETLEMATLDKEMAEEKAETLELELEQANERIEELTLDLEIMKAELEKITSGHNAEINNEDGAPVTNYQLKQLEQQNIRLHETLVRMRDVSAHEKHETQKLQKELEQRKAEINDLRKNTDKLTARCAELEEQVADLHEQVDAALGAEEMVEQLSLQKLVLEENVSKLQEEVFDLEALKDISDQLQEDSRELELQLRQDVDMANATIREVQKEKENALEMLADRELTIVKFRELVAKLKERCQELEHQLDRECNSKAAMSLSIPEMLDYKKIFIDSKALARAIDLELRRMEVEMLQQHVNLLQAFMPDSFMKGSGDHDAVLTLLLIPRLIWKSEILISQTRDKFPAIEITTNREALLKDHSANQFAARSRFCSYLYFLQAVLRQFLNGLNTCPPDLLMNIAGIFPELNLHEKTIDSYVELLRTNQLDENVNTDALEKCLNYFCAMHPAYLLRAGVNLHQSFLLSDYHKAFSAAIDSLRTDAAIINAVMQPESNPHDIELLCQHLMTSCEVMFTHLKPVRLLLSSSPGAEKTADFGLGEMFLQNTLSQAQTHAMKASKVIRDIARVSFSSIVITGAVDNEVGIDKNKMFEIATSCCDRVFDDTLQGPVAVIKNEINALAADIANLAQTIQETIHSSSNVAQAKSKSSVEITPPIMVRAKQTKEELGNTKVLRTKIEALDADIRELKMTLRAKQEEIGELSVRKELAEKKLANAVRDNEFNTQKLQRKLEEAQNQLKRKEKEFEETMDHLQSDIDNLEAEKGELKDKLKNYSKKAFIEGVAAKTVGGSLTSPVHSGGPVQVIESPLLLDEIDNLRRALDVVQMEKGQLEAQYCQKILDGMKPLIIPQKPTKTKLDELKIKAKNLRQELLIKSLPKVPDLSKRIIGVEPALDPAYQKHFRQKKEMKELQRKADALETEIQEEIIRQKAGSGIDTDLKVFPTPEMTKAFKEMDPILIGEVVVPVPASDPDSGQTRKLFLDSNQFKCLQQKLLAMGT

SEQ ID NO: 135 - protein, 1092 aa, Bemisia tabaci
MTIVVALIYFLTSSVLNVQSYILGRRVSEDSCRISLSRDLATIPSLMINESAGTLLYPTEDDVIVLAPNAEFLLYCPSGFAERRIQPRGIRVVCKRDNSVVYGNATYRINQLGCTKHPDSTLRRTGATCSRGNYTLLHVGYEYESEESPSVGGEGDDGGNGVGLDNDVDADEEETETGRNETGNGIEAETEVSRDETGNEIREVEAETEVSVNEGGDSVRVVESGMGTDAGETGNGVLAVEAETEVSVGESGRGVQGVEPEKVTVVDETGNGVLAVEGETEVSVGESGRGVQGVEPEKKTAADETGNGVRAVEAETEVSVDESGSGIRGGESGKETDADETGNEVRAVRVEVEEDDEKTAEVKMEMGMGETGDGFRTMKPDHFSGKLKVGKQGGAASTTTNGGIKNDFELRNLKVVPEKEPTDTEVDTSVTVKESGGDSKLLSLFAGYRMRIQEGVHNVAFDLPLNFRSTGSRKLAPLVVENVRALGTFTTGNNMSGTNGRVTRDASNIRIRQEEQTPIRDGMKMILMKKMFATGSDASLLDDGYSLKPHDARFTGNDVRLTESSASLTASSNIRIGGITNINGNDGGFIGGSVTPAENAASSAGNSVSFTGNIEGLIESTTIHTEGEPSYTYTGSNLSGGDASFTRNGAGSTGNGLSLSEYSANSIRSYTAFARNGHNSAGNAHDPSLTGNDPSLTGNDPSLTGNDPSLTGNDLSRTGNGPSLSRDDSNFPRNSASLPRNGPGFARSDSKHTGNAKRRNRKRPHNKSATSENVLNPEKASFRRRPVGEVRFIKLIEICYDLERHRAVYASHELDERIRGRQHSVPRINFKTDIFDEERIDVNALYTRKGQLARLTALLGSADLANEYIRRDDHFLARGHFSPKADFVHAAEQLATFYYVNVAPQWQTFNGGNWVKLEDALRDLIVKRPGKLHVYTGTHGVIALKDINDNEVEIYLGEKDGRPIVPVPKYYWKVFYRPEQREGVAVVGLNNPYREVAEGDILCEDVCRAYEWLDWDTNNQDKGVMYCCALGEFQRKFIHLGLEESETVTIRSEGQEDEEDEQGERVVESTTFKMESSSSSPILGSTHLQHKM

SEQ ID NO: 136 - protein, 401 aa, Bemisia tabaci
MHLLFGLCFLPLLSATLPPTRPSQNFKIEELGDEETARDSVRGDVRKRQAQAIDFQECAAPNNRTGHCRHLEDCLIPEYTETYRENIKHFCVIDVKNALYAGVCCPDDTASKTLSTRQILSRESPIDSRIVNSAQSNLAQSNLCGSNGKKTDRINAGEANYNDWPWMVALMQYKKFKRSWVHFCGAVLITETHVISAAHCFNTLKWQDIMVRIGAYNFKKANEFPYTDYKVRAAKIHEDYDKATNENDLIILSLERPVKFNKMVRPVCLPSPQSEDVTTLVNRTAVVAGWGATSFGGPASSTLLEVSVPIWEHEFCKGQLTQVIHDTTICASAYEGGRDACQGDSGGPLFFQRTDGRWTSIGVVSWGVGCAAKGKPGVYTRLTSYLPWIAQAQKEMGVFTS

SEQ ID NO: 137 - protein, 533 aa, Bemisia tabaci
MLNHTGSLLLQTMLYLANSEFSSLELDNGTVLQPQTDVTAKCYGEYGCYSINYPWSDILRPVAQFPESPEKVNPKYCLYTRRNADSCELLDHKDPLTMYKSYLVPTHRIYFIAHGFLESGDRPWIKKLTKALLHKGDVNVITVDWGSGSMPPYAQAVANIRLVGRITAHLIQTMRKELGVRVEYCHIIGHSLGGHLAGYVGHALQEQFGVKLGRITGLDPAEPHFSQTAPEVRLDSTDASFVDIIHTDATPFIKGGLGMDEPIGHLDFYPNGGESQPGCDQSMSKLINDEKGSFFKGLRRFLNCDHVRSYEYFIETVNTDPQCSFLAVECESWENYLAGNCFGCDQKDRMCATFGFNSVHSIQKIAATRHSIVPSPTRKEVKLFLITNSKEPFCQAQYKVTVMISNSTQSVEHGGEIGLFEIEIMGALGKTKSIPLFREQYYKPGGTYTGVVADVNVGHLQGAILHWQHRTTFNILTWRFDNVVIYVNRVIVESLHPSERLELCPEGSSVLVSGRSTNLNSCVFSPEPEVKVS

SEQ ID NO: 138 - protein, 352 aa, Bemisia tabaci
MTTKQILVRQMSLQARLKLRKSQRIWFFLLAAGTLISLSLLFGARRHRIHLSQFLAPPYKGPPPDDLWANINNETGAAELIVPNIVHFVLFEDPKISFMHFVCILAALRNQRPEKIYFHGNVAPSGGYWERLMKLEPFTERLEMRRVELPTEISGVKIQPGWRIFHGGDVTRIRVLMEYGGIFLDSDSYVVRSLDYFRRFEMSIGWDENQFLGSQIIVAHKDARFLYHWLHSYDGAYDPKKWYYNAGELPTTSVLYHHPELVHRVKVLFGNDMKFIHMLFSKYWPGWRENYTFHLLARHQYLLKNISSVAYYPVVFDEFNLQHYPITFREMANEVLDYEKQLLGKPIKGPAG

SEQ ID NO: 139 - RNA, 294 nt, Bemisia tabaci
  source 1..294: mol_type = other RNA
tctacggagacgctgaataagctcaaggagttgctccagtcgaacaacaacaacagtcagtacatctccaaagcggtcgcacagcagatcatcgacgaggcgagttgtccctcgacaccagcgagtgacgtcaactcggctccgttggacttgagtaaatcatcgggcaatgatggtaatacgagtgcgtctgcaggctcaaaccgacgtaaaggcaaggctgtaaagagggtgccggtgcactccatgtattacgatgatagcgatggtgaaaggtctccagttaagttcagc

SEQ ID NO: 140 - RNA, 188 nt, Bemisia tabaci
  source 1..188: mol_type = other RNA
attccactcttggccatctgcgctttctctgtggcctactcgatgggtctgggctcgctggtgcccacgctcatgggcgagtgcttcccctctcaaatccgcggtcctgccagctccatgacgtccatcacgctctgcgccatctccttcctcgtcatcaagttcttccaggtggtcaacgaggagat

SEQ ID NO: 141 - RNA, 252 nt, Bemisia tabaci
  source 1..252: mol_type = other RNA
tcaattttgcatcttggaaagtcgggcttgaccaccaaagcgattactaatgatgatgctgacaggctcttggtgagtctccgagtgctgtcagaaaaagccccacctatcgttggaatttacaccaaaaactgccggcaagccttagcatccatgcttgtcgccaaagcagaggaagaagcttcatcgcaaaaggccaaagagaaaccaggaaaccaagtccaaaccgatgaccccatcaactttatgcaa

SEQ ID NO: 142 - RNA, 312 nt, Bemisia tabaci
  source 1..312: mol_type = other RNA
aatggcgagaccaagaattgctctcgcccgatctcgacccgacgaactactggaattacaaccggtcgcggacgatggaccaaccgaatacatatagattgataacaaggttcagggaggtcttcgatttctacacgaagaaagaggggaaaacaaaagtactaatgacagaagcatatacaactctcgatagaacaatggactattatcagtttgaggggaaaccaggagcccatatgccattcaatttctttttcatcacgcacgtgagcggtcgctctcccgccaaagattaccaaaaggcaatccagg

SEQ ID NO: 143 - RNA, 258 nt, Bemisia tabaci
  source 1..258: mol_type = other RNA
cacatggatgttgatcaagtgcatgatatgatggatgacattgctgaacagcaagatgttgctaaggaaatctctgaggccatttcaaatccagtcgcatttggccatgacattgatgaagatgaattagagaaagaattagaagaactagaacaggaagaactagacaaagaacttctcggcactgggccttcaccagcactgccaattgtgccttctgcagagcctgctaaagtggcagataaatcaagtggcaag

SEQ ID NO: 144 - RNA, 163 nt, Bemisia tabaci
  source 1..163: mol_type = other RNA
tggagctctcagtagagcatactggcgctggaatcgtagattcaaccactgtcgtattggtaacgctgcttacccgctccaagttataatcggaggagcaattattggatatttgatcaactaccccagaactcagaatcacatctataggaagtaccactaa

SEQ ID NO: 145 - RNA, 302 nt, Bemisia tabaci
  source 1..302: mol_type = other RNA
caacgtttgcagaactctgtgatagaccgctggggtcaagtgattactgtatgttagctcaaattttccatactgtgattataaatgatgtgcctcagctgacgttgaaaaacaaatccttagttaggaggtttatcatgttaatggatacgctctatgacaatagggtgcgtgttgtgattactgctgatatacctttggatcaattgttcctaatgaaaaaatctgatggtattggtgaccatgaccgagttcttatggatgatctaaatatttcatcagaatccgaaaatgccgtagcc

SEQ ID NO: 146 - RNA, 188 nt, Bemisia tabaci
  source 1..188: mol_type = other RNA
attgatcgttctttgctcacatctgactcattgggcaaagctgtatcttcaatcaacaacttcggagttatctccggtcctggagtgactactcaagtgagatttgctcacacagatgtcaaagttccagactttacagcttataggcgagactccaccaagagcccgacctctgacaatgacaagtc

SEQ ID NO: 147 - RNA, 227 nt, Bemisia tabaci
  source 1..227: mol_type = other RNA
gtcggtagatgaattcttgcaagagacacccccagaacaatcatggagtggttgggcggtgcattctttggtgaaaagtcctgcaagatgggcattcaccaagttaaaaactaatgtatttgcctccaattcaacagttcaggaagacactgagtttgtccatctgccatctttgaaggtgcttgctgaaaatatcctcaagtccgtcgaatttgatcatctctacg

SEQ ID NO: 148 - RNA, 325 nt, Bemisia tabaci
  source 1..325: mol_type = other RNA
gaagcagttctcgccgaatcacagctatatgaccaacttggccgataccgacgtggacgactcgagcgagatgagcacgcaccacctctcgccgggcgcgcagccgccgaaaagcgggacgaatttccatctgctcaacgccgaggagatccctttccagtacgtgagctgcgattcgtacaggatggaccaatgcgtgaatcagtacaggtcttgcgatgctcccgaagagttcaattttgcttgtacgatggatgcttctgtccaatatcccagtgagcaactgacgagtctggattcgacgatgatgacgacgtatcctgcg

SEQ ID NO: 149 - RNA, 273 nt, Bemisia tabaci
  source 1..273: mol_type = other RNA
acttccagtggacacagcaaaaggagtatatggacatgtcatggggttgtggcagctttctagcaactctttttgtattcatcaatctagttggtcaattaggaggctgtgttttggttatagttcagaagcaagtccctgctgcgtgtggtgtgctctttttcatcgtagttttacagacttttgcgtatgatattctctgggatctgcatttcctattgcgtaatctagctttaattggtgctctactcctcgttctggctgacagcaaag

SEQ ID NO: 150 - RNA, 256 nt, Bemisia tabaci
  source 1..256: mol_type = other RNA
cgttgatgtggtcccttggaaaagtactaagaactcctgaagtatcacgagtctacgtcggttcattctgggatcagcctctgcagaatgatatgttcagaaagttgtttgaggatgaagaaatggatctcatgaaagatattcagtcgctacctagaaataacaccttacgaaaactaaatgacataagtaaacgagcaaggcttgccaaaactcaggcttatttaattgcagaattgggtggacaaatgccaac

SEQ ID NO: 151 - RNA, 276 nt, Bemisia tabaci
  source 1..276: mol_type = other RNA
tcctgaacctgttcccttgcacccctgcagagttaaaagcaataggctacaatgaagtcactcaaaatatagccaagtcattccaagctgccaagtctggcgggccgatcatctccagcctggacgtgatggatgacggagatgcagctcagagaaatctcccgaagccagacgtatcacaaatgattccatataagcctaaacgaaatgcattcatcggtgaacatcctatcccaggtggcagcttccctccacctcctgccgttgctcaactaa

SEQ ID NO: 152 - RNA, 255 nt, Bemisia tabaci
  source 1..255: mol_type = other RNA
ctgcatattccagcaaccgcaatgccaatatggaacgtattgcagagcaaatcgcaacattatgtgcaactttgggcgagtatccctcagtaagatatcgcagtgactttgacaagaatttggaattggcgcatgtgatccagcagaaattagatgcatacaaagctgacgaaccaacgatgggggaggggccagagaaagctcgctctcagctcttgattctagacagaggctttgattgcgtttcaccggttc

SEQ ID NO: 153 - RNA, 250 nt, Bemisia tabaci
  source 1..250: mol_type = other RNA
gcgttgcttcccttgacaaaattgaattaaaagaagtcctgacgaccatcaattccgtttacggaacgagtcaagttttgaacgctgtgactggttcgcaaccatctctacctcttcagcaacagttgatagtttgttctctccttctcatgatggaccatgaaaccaagaaactggacatcacattaggaaagttgtatgatgtgttccgcaaagtctgctcaaagcaaaggcttggtggtgtcgattt

SEQ ID NO: 154 - RNA, 300 nt, Bemisia tabaci
  source 1..300: mol_type = other RNA
agagttgcgggacctgattttctgccagattcatcaacaccaaataaattctgtacaagctcttggaaggtgtatgggatggcagcaccttgcgaacagcccccatttaggaattggacctgtcgaacccctaggcaacgccagttcttgcatcctagcctctccaatgggtgacaggattattgccattcgttgtgcaccacaagcgggacctcaagttttcattgctcactcgccgcgaaaagatttcttcagtggacagctagtcaaagagcgcaaatgggaaaacttaggtgggcc

SEQ ID NO: 155 - RNA, 300 nt, Bemisia tabaci
  source 1..300: mol_type = other RNA
ccggccaaaaaccactcttcattaattgtgatttcggtattgaccttagttctcgtgttgctatcgtaggtcctaatggagttggtaaatctacgtttttgaaacttcttaccggtgatttggagccaacaaaaggtgaagtcaaaagaaatcaccggcttcgaattggaaggtttgaccaacacagtggagaacatttaacagctgaagagacccctagtgaatatttgatgcggctatttgatttgcagtacgaaaaggcgcgcaaagctctaggaacgtttggtctggcgtcacatg

SEQ ID NO: 156 - RNA, 274 nt, Bemisia tabaci
  source 1..274: mol_type = other RNA
ccaaaacaagcgtgctggaaactctacgttgacatccttattttagagtgtggtggcaatttttacgatgctatctccttggcggtcaaagcagcactattcaacactcgtgtgccgcaggtcaccggttcatttttagatggaggtagtgttgatctagaagtttccgatgatccattccaatgttggaggcttgatataacaaaagcacctgtccttgtgactcttagtaagattggagacaattgtgttgtggatccaactgcagaagagg

SEQ ID NO: 157 - RNA, 266 nt, Bemisia tabaci
  source 1..266: mol_type = other RNA
tgtgtccacgactgtccaagccataagctcaacaagcagtcctctagcaagtggtacgaacatcatcaaaccagttcagtctgtcatgacgaaggttgtctccaacgctcaaacagaatcggtcgtaacagtgggaaatctcctggcgaaccaaaagcagcagactgtgatatcttccgatggaagtatacgtgtagcagacaaaccaagtataggttctcatcagtatacagttgtgtcgatgggagagggtcagtcaagggtca

SEQ ID NO: 158 - RNA, 278 nt, Bemisia tabaci
  source 1..278: mol_type = other RNA
ttgaaaggcgagcaactagcttctgacgttagtttagatgtattggcaacaaaaactgatggtttttcgtgctcagatttgtatgaattgtgccgtaaagcagtgagcactaggaatcagaaagctttccaatcttatgtcaagagccaagaaaacggtggcatttttgattcgaggaatcaaagcaaagaagactcttctaaagacttatcctctagtcagtcgtcaaaatcaccaagtagtaaaagtgaacgtccttccggagacgcagaatttgt

SEQ ID NO: 159 - RNA, 294 nt, Bemisia tabaci
  source 1..294: mol_type = other RNA
atcatacgaacgtggaggcccagaggcgggatcctgatagccacctcaacattttcaaacgcctcgttgatctgagaggaacgcccgtctatttacacggcgacttacaaacttttgtacccaaggagtgggtttacatgttcaccagatcaaccaaggcggaaacgattgcagtgctaatgaatttggggtcggaaacggaggagatctgcgctcggcattctgccacgcatttaccggaaactatgttcgtccatacaagcagtgtcaattctcgcctcaaaattggggaca

SEQ ID NO: 160 - RNA, 240 nt, Bemisia tabaci
  source 1..240: mol_type = other RNA
ccaagtttatcatcagacggaagttgggcatccgtgtactggcctcaacacacaacgtacggtcgggagttcttaacgttagacataaactccactgccatcggccaaggccctcgtttgcggcagtgcgccttttggaaaaaatacctgccccagctcatctccaccactagttaccttgtccctgccaactcaagcaactgcaccagtgcagcgccaagttctctccttcaacatggg

SEQ ID NO: 161 - RNA, 151 nt, Bemisia tabaci
  source 1..151: mol_type = other RNA
aaatctcccggttctggagttggagttccaattttggatgaacaaccgcatgataaacgtgaaaaaggacgggaaaacgtatcgaatggcgcattacagtgtcgaaacgtgcggacccaggccggaatcattcaaggaggatttcaccctg

SEQ ID NO: 162 - RNA, 200 nt, Bemisia tabaci
  source 1..200: mol_type = other RNA
aaatcacgccaaaaacaggttacacggctgctggtaatctgggagtaacgacactgtctacaggagtttccgacctgcagggtgtggcgatagaagcactaatcacatttgtgctgcttttagttgtccagtccgtctgcgatgggaagcggaccgacatcaaaggatctatcggcgttgcgataggattcgcaattgct

SEQ ID NO: 163 - RNA, 212 nt, Bemisia tabaci
  source 1..212: mol_type = other RNA
cagaactgaagtatgtgttggaaaaagcgcacgcattttttcaagagagtttctgtttaaaacagcaagagggcgccagtggctcgggcaacaacgactcgctcacgaaagcactcatcagcgatgaaagccagcagcagtcctctcgcggtagattagggtttgtcgctggagttgtgccgcgggaaagagtgccagcgtttgagagaatg

SEQ ID NO: 164 - RNA, 255 nt, Bemisia tabaci
  source 1..255: mol_type = other RNA
aacacagtgaccggtgcaagagggaatcatgtgacgaagatccacaagacttgtcggagtcaagtgagcccgctaataatgatctgaactgtcgcagcatttcaagattagacatggaaaatgactcggatcacgagccggaaaggtatacttctccctcgccctacgacaactggagcatagacagcaagcacagcgacgaggatgcaatgcgagatgtaaacagccctggcatggatagtcttcaggaccagc

SEQ ID NO: 165 - RNA, 270 nt, Bemisia tabaci
  source 1..270: mol_type = other RNA
tgctcttggtggcttgactttcctggtgaacagtaccgtctcgatcaagatggagaggatactgcgaagcgccaaggcactgaatgactatgccttatacaaacgcggaccattggccgttcccagtggatccgaagccattgccttcatagacaccaaaagaccttttgaccccgacggctaccctgacattgagttcctcttcatcggaggaagctacccctcaaacccccttcacaggtacatattccggatcgaagacacgctgta

SEQ ID NO: 166 - RNA, 298 nt, Bemisia tabaci
  source 1..298: mol_type = other RNA
tgttcacccagactcaggtcgctgagttcaaagaaggctttgctttaatggaccacgacaaagatggtatcattggcaagaacgacttgagccagacctttgaccaggttggtaaactcgtcaatgagaaggaattggacgccatgttggaagaagctcccggcccaatcaacttcacccaactgttgtctcttttcgccgctaggatgtcaggaggctctgatgatgatgcaactgtgatcaacgcatttaaagcttttgatgaaggtggcatgatcaacggaaaagctctgaggca

SEQ ID NO: 167 - RNA, 301 nt, Bemisia tabaci
  source 1..301: mol_type = other RNA
atggccagtgagagtggttgtccaattgaggtgcatcgcattcaaattgacaagtgcgatgagatgtacgatccagactgcgctggggacaagtccattcccttccaccgtgctggctacgacagcaagactggacagagccccaacaaccctcgccaacagataaaccgagtgacaagttggattgacggaagtttcatctacagcaatagtgaggcatgggtcaacgccatgcgctctttcgtcaatggttccttcaaaactgatccaactggcaagtggcccgttcgaaataccatgc

SEQ ID NO: 168 - RNA, 271 nt, Bemisia tabaci
  source 1..271: mol_type = other RNA
atgagcgaatggacatacatgttcacaaggagtacctctagagatgatacagtggctgttatcataaatctaggaactgaaacggaggaagtttgtgctcaaaattttgcagtaggtctgcccgacattatgacagtttacacggcctcgttaaattctggatttgacgttggggatagaattacgacatcaagggtcaacggaggaaagtgtgctgagttaagacccaaagcaggcttcgtccttagtgtcaattccggcagtagcttgc

SEQ ID NO: 169 - RNA, 254 nt, Bemisia tabaci
  source 1..254: mol_type = other RNA
cgatgagagtgggaatcgcattgatatggccaattctggatccacgtctctaacatccctagatgactcgacctcttctaagctgacacctccaggacagcgttccaggttgagcagctctcggttatctctggccagttcaaaaagtggctccactccgtcaaggagcaaggaagatgtgcgactatccaccggaaccctcgctgactcttcgttgtcagacaattcaacaccgtctgaggccaaatccgcta

SEQ ID NO: 170 - RNA, 311 nt, Bemisia tabaci
  source 1..311: mol_type = other RNA
cggttacagcttaaagccgcatgatgcacgcttcaccggaaacgatgtcaggctgactgaaagcagtgctagcctcactgcgagtagcaacatccgcatcggtggaattacgaacattaacgggaacgacggcggcttcatcggaggaagtgtaacccctgccgaaaatgcagctagctccgccggaaatagtgtaagctttaccggaaatattgaaggtctaatcgaaagtaccaccattcacactgaaggtgaacccagctatacctatactggttcgaacctttccggaggtgacgccagctttacta

SEQ ID NO: 171 - RNA, 279 nt, Bemisia tabaci
  source 1..279: mol_type = other RNA
gtcagaaaacgtcaagcgcaggctattgactttcaagaatgcgcggctccaaataatagaactgggcactgccgtcacctggaggattgcctgataccggagtacacagagacatatagagaaaacatcaaacatttttgcgtcatcgatgtcaaaaatgctctctacgctggcgtgtgttgcccagacgacacggcatcaaagactttatcgactcgccagattttatcacgggagagcccaatcgattcgaggatcgtcaacagcgcgcaatcaaat

SEQ ID NO: 172 - RNA, 276 nt, Bemisia tabaci
  source 1..276: mol_type = other RNA
tattctgagaccagtggcgcagtttcctgaatcgccggaaaaagtaaaccccaagtactgcctatacactcgacgcaacgccgactcgtgcgagctcttagaccacaaggatccacttacgatgtacaagtcttatctcgtccctacacatcgcatttacttcatagctcatggattcttggagagtggggacaggccttggataaagaaactgacaaaagcgctgttacacaaaggagatgtgaatgtaattacggtggattggggatcagggtc

SEQ ID NO: 173 - RNA, 292 nt, Bemisia tabaci
  source 1..292: mol_type = other RNA
tgaagttggagcccttcaccgagcgcctggagatgcggcgcgtggagctgccgacggagatatccggggtgaagatccagcccgggtggcggatcttccacggaggtgacgtcacccggatccgggtgctcatggagtacggaggcatcttcctcgacagcgactcgtacgttgtcaggagtctcgactacttccgacgcttcgagatgtccatcggctgggatgaaaatcagttcctcggttcccagatcatagtagcccacaaggacgctcgtttcctgtaccactggct

SEQ ID NO: 174 - DNA, 44 bp, synthetic construct
  source 1..44: mol_type = other DNA
taatacgactcactatagggtatgtaattgaacgtaggtgcaat

SEQ ID NO: 175 - DNA, 43 bp, synthetic construct
  source 1..43: mol_type = other DNA
taatacgactcactatagggaaccaatctgtatcgtcaaaatc

SEQ ID NO: 176 - DNA, 39 bp, synthetic construct
  source 1..39: mol_type = other DNA
taatacgactcactatagggggcacaagctggagtacaa

SEQ ID NO: 177 - DNA, 40 bp, synthetic construct
  source 1..40: mol_type = other DNA
taatacgactcactatagggtctcgttggggtctttgctc

SEQ ID NO: 178 - DNA, 42 bp, synthetic construct
  source 1..42: mol_type = other DNA
taatacgactcactatagggtctacggagacgctgaataagc

SEQ ID NO: 179 - DNA, 38 bp, synthetic construct
  source 1..38: mol_type = other DNA
taatacgactcactatagggagacctttcaccatcgct

SEQ ID NO: 180 - DNA, 40 bp, synthetic construct
  source 1..40: mol_type = other DNA
taatacgactcactatagggattccactcttggccatctg

SEQ ID NO: 181 - DNA, 40 bp, synthetic construct
  source 1..40: mol_type = other DNA
taatacgactcactatagggatctcctcgttgaccacctg

SEQ ID NO: 182 - DNA, 40 bp, synthetic construct
  source 1..40: mol_type = other DNA
taatacgactcactatagggcatcttggaaagtcgggctt

SEQ ID NO: 183 - DNA, 40 bp, synthetic construct
  source 1..40: mol_type = other DNA
taatacgactcactatagggagttgatggggtcatcggtt

SEQ ID NO: 184 - DNA, 40 bp, synthetic construct
  source 1..40: mol_type = other DNA
taatacgactcactatagggaatggcgagaccaagaattg

SEQ ID NO: 185 - DNA, 40 bp, synthetic construct
  source 1..40: mol_type = other DNA
taatacgactcactatagggcctggattgccttttggtaa

SEQ ID NO: 186 - DNA, 42 bp, synthetic construct
  source 1..42: mol_type = other DNA
taatacgactcactatagggcacatggatgttgatcaagtgc

SEQ ID NO: 187 - DNA, 42 bp, synthetic construct
  source 1..42: mol_type = other DNA
taatacgactcactatagggcttgccacttgatttatctgcc

SEQ ID NO: 188 - DNA, 40 bp, synthetic construct
  source 1..40: mol_type = other DNA
taatacgactcactatagggtggagctctcagtagagcat

SEQ ID NO: 189 - DNA, 41 bp, synthetic construct
  source 1..41: mol_type = other DNA
taatacgactcactatagggttagtggtacttcctatagat

SEQ ID NO: 190 - DNA, 41 bp, synthetic construct
  source 1..41: mol_type = other DNA
taatacgactcactatagggcaacgtttgcagaactctgtg

SEQ ID NO: 191 - DNA, 40 bp, synthetic construct
  source 1..40: mol_type = other DNA
taatacgactcactatagggggctacggcattttcggatt

SEQ ID NO: 192 - DNA, 39 bp, synthetic construct
  source 1..39: mol_type = other DNA
taatacgactcactatagggattgatcgttctttgctca

SEQ ID NO: 193 - DNA, 40 bp, synthetic construct
  source 1..40: mol_type = other DNA
taatacgactcactataggggacttgtcattgtcagaggt

SEQ ID NO: 194 - DNA, 41 bp, synthetic construct
  source 1..41: mol_type = other DNA
taatacgactcactatagggccaagtttatcatcagacgga

SEQ ID NO: 195 - DNA, 40 bp, synthetic construct
  source 1..40: mol_type = other DNA
taatacgactcactatagggcccatgttgaaggagagaac

SEQ ID NO: 196 - DNA, 40 bp, synthetic construct
  source 1..40: mol_type = other DNA
taatacgactcactatagggaaatctcccggttctggagt

SEQ ID NO: 197 - DNA, 40 bp, synthetic construct
  source 1..40: mol_type = other DNA
taatacgactcactatagggcagggtgaaatcctccttga

SEQ ID NO: 198 - DNA, 40 bp, synthetic construct
  source 1..40: mol_type = other DNA
taatacgactcactatagggaaatcacgccaaaaacaggt

SEQ ID NO: 199 - DNA, 40 bp, synthetic construct
  source 1..40: mol_type = other DNA
taatacgactcactatagggagcaattgcgaatcctatcg

SEQ ID NO: 200 - DNA, 41 bp, synthetic construct
  source 1..41: mol_type = other DNA
taatacgactcactatagggcagaactgaagtatgtgttgg

SEQ ID NO: 201 - DNA, 40 bp, synthetic construct
  source 1..40: mol_type = other DNA
taatacgactcactatagggcattctctcaaacgctggca

SEQ ID NO: 202 - DNA, 39 bp, synthetic construct
  source 1..39: mol_type = other DNA
taatacgactcactatagggaacacagtgaccggtgcaa

SEQ ID NO: 203 - DNA, 42 bp, synthetic construct
  source 1..42: mol_type = other DNA
taatacgactcactataggggctggtcctgaagactatccat

SEQ ID NO: 204 - DNA, 40 bp, synthetic construct
  source 1..40: mol_type = other DNA
taatacgactcactatagggtgctcttggtggcttgactt

SEQ ID NO: 205 - DNA, 40 bp, synthetic construct
  source 1..40: mol_type = other DNA
taatacgactcactatagggtacagcgtgtcttcgatccg

SEQ ID NO: 206 - DNA, 40 bp, synthetic construct
  source 1..40: mol_type = other DNA
taatacgactcactatagggtgttcacccagactcaggtc

SEQ ID NO: 207 - DNA, 40 bp, synthetic construct
  source 1..40: mol_type = other DNA
taatacgactcactatagggtgcctcagagcttttccgtt

SEQ ID NO: 208 - DNA, 40 bp, synthetic construct
  source 1..40: mol_type = other DNA
taatacgactcactataggggtcagaaaacgtcaagcgca

SEQ ID NO: 209 - DNA, 40 bp, synthetic construct
  source 1..40: mol_type = other DNA
taatacgactcactatagggatttgattgcgcgctgttga

SEQ ID NO: 210 - DNA, 40 bp, synthetic construct
  source 1..40: mol_type = other DNA
taatacgactcactatagggatggccagtgagagtggttg

SEQ ID NO: 211 - DNA, 40 bp, synthetic construct
  source 1..40: mol_type = other DNA
taatacgactcactataggggcatggtatttcgaacgggc

SEQ ID NO: 212 - DNA, 40 bp, synthetic construct
  source 1..40: mol_type = other DNA
taatacgactcactatagggtattctgagaccagtggcgc

SEQ ID NO: 213 - DNA, 40 bp, synthetic construct
  source 1..40: mol_type = other DNA
taatacgactcactataggggaccctgatccccaatccac

SEQ ID NO: 214 - DNA, 40 bp, synthetic construct
  source 1..40: mol_type = other DNA
taatacgactcactatagggatgagcgaatggacatacat

SEQ ID NO: 215 - DNA, 40 bp, synthetic construct
  source 1..40: mol_type = other DNA
taatacgactcactataggggcaagctactgccggaattg

SEQ ID NO: 216 - DNA, 40 bp, synthetic construct
  source 1..40: mol_type = other DNA
taatacgactcactatagggcagataattgtggcgcaccg

SEQ ID NO: 217 - DNA, 40 bp, synthetic construct
  source 1..40: mol_type = other DNA
taatacgactcactataggggggtaggaagcattgggtga

SEQ ID NO: 218 - DNA, 40 bp, synthetic construct
  source 1..40: mol_type = other DNA
taatacgactcactatagggatcatacgaacgtggaggcc

SEQ ID NO: 219 - DNA, 40 bp, synthetic construct
  source 1..40: mol_type = other DNA
taatacgactcactatagggtgtccccaattttgaggcga

SEQ ID NO: 220 - DNA, 40 bp, synthetic construct
  source 1..40: mol_type = other DNA
taatacgactcactataggggaggtgagctggaacgccac

SEQ ID NO: 221 - DNA, 40 bp, synthetic construct
  source 1..40: mol_type = other DNA
taatacgactcactatagggcactttcacgccgccggtca

SEQ ID NO: 222 - DNA, 39 bp, synthetic construct
  source 1..39: mol_type = other DNA
taatacgactcactatagggatggtttacctgctctacg

SEQ ID NO: 223 - DNA, 40 bp, synthetic construct
  source 1..40: mol_type = other DNA
taatacgactcactatagggcttgactaggacgatcctgg

SEQ ID NO: 224 - DNA, 40 bp, synthetic construct
  source 1..40: mol_type = other DNA
taatacgactcactataggggttggtagttgttccaaggg

SEQ ID NO: 225 - DNA, 42 bp, synthetic construct
  source 1..42: mol_type = other DNA
taatacgactcactataggggttaactttcaaccaccgaacc

SEQ ID NO: 226 - DNA, 40 bp, synthetic construct
  source 1..40: mol_type = other DNA
taatacgactcactatagggccggatcttcgtcaacaacc

SEQ ID NO: 227 - DNA, 42 bp, synthetic construct
  source 1..42: mol_type = other DNA
taatacgactcactatagggcggaaaactcagaaagtcggtc

SEQ ID NO: 228 - DNA, 42 bp, synthetic construct
  source 1..42: mol_type = other DNA
taatacgactcactatagggcgaaaatttccgctcgacacac

SEQ ID NO: 229 - DNA, 43 bp, synthetic construct
  source 1..43: mol_type = other DNA
taatacgactcactataggggttgcgattaaactgtgttgagc

SEQ ID NO: 230 - DNA, 40 bp, synthetic construct
  source 1..40: mol_type = other DNA
taatacgactcactatagggggcagaaccactctaggtgt

SEQ ID NO: 231 - DNA, 41 bp, synthetic construct
  source 1..41: mol_type = other DNA
taatacgactcactataggggtagagcgcaaaatacgaacg

SEQ ID NO: 232 - DNA, 41 bp, synthetic construct
  source 1..41: mol_type = other DNA
taatacgactcactataggggtaatgaccagcttgataacg

SEQ ID NO: 233 - DNA, 39 bp, synthetic construct
  source 1..39: mol_type = other DNA
taatacgactcactatagggtatcgccaggaaagcgagt

SEQ ID NO: 234 - DNA, 39 bp, synthetic construct
  source 1..39: mol_type = other DNA
taatacgactcactatagggctagcaggttggacatggc

SEQ ID NO: 235 - DNA, 39 bp, synthetic construct
  source 1..39: mol_type = other DNA
taatacgactcactataggggagttctcctcgtagccgt

SEQ ID NO: 236 - DNA, 40 bp, synthetic construct
  source 1..40: mol_type = other DNA
taatacgactcactatagggtgagtctggagatgaagagg

SEQ ID NO: 237 - DNA, 42 bp, synthetic construct
  source 1..42: mol_type = other DNA
taatacgactcactatagggagggcgtctttaataatttagc

SEQ ID NO: 238 - DNA, 42 bp, synthetic construct
  source 1..42: mol_type = other DNA
taatacgactcactataggggtcggtagatgaattcttgcaa

SEQ ID NO: 239 - DNA, 42 bp, synthetic construct
  source 1..42: mol_type = other DNA
taatacgactcactatagggcgtagagatgatcaaattcgac

SEQ ID NO: 240 - DNA, 39 bp, synthetic construct
  source 1..39: mol_type = other DNA
taatacgactcactataggggaacaaacggcagtgctga

SEQ ID NO: 241 - DNA, 41 bp, synthetic construct
  source 1..41: mol_type = other DNA
taatacgactcactatagggggagacaccatcactcacaca

SEQ ID NO: 242 - DNA, 41 bp, synthetic construct
  source 1..41: mol_type = other DNA
taatacgactcactatagggcattcagtgacactgacatgg

SEQ ID NO: 243 - DNA, 40 bp, synthetic construct
  source 1..40: mol_type = other DNA
taatacgactcactataggggcttcttgctgtccttgact

SEQ ID NO: 244 - DNA, 40 bp, synthetic construct
  source 1..40: mol_type = other DNA
taatacgactcactatagggggatgaaaccatggactcag

SEQ ID NO: 245 - DNA, 39 bp, synthetic construct
  source 1..39: mol_type = other DNA
taatacgactcactatagggcttgcaatcggttctgcat

SEQ ID NO: 246 - DNA, 41 bp, synthetic construct
  source 1..41: mol_type = other DNA
taatacgactcactataggggttcggtttatgtactactca

SEQ ID NO: 247 - DNA, 41 bp, synthetic construct
  source 1..41: mol_type = other DNA
taatacgactcactataggggataaccttcatctgtgtcag

SEQ ID NO: 248 - DNA, 39 bp, synthetic construct
  source 1..39: mol_type = other DNA
taatacgactcactatagggtggccaccttattcttcgc

SEQ ID NO: 249 - DNA, 39 bp, synthetic construct
  source 1..39: mol_type = other DNA
taatacgactcactatagggcgttgaaagcaaatggtgc

SEQ ID NO: 250 - DNA, 40 bp, synthetic construct
  source 1..40: mol_type = other DNA
taatacgactcactatagggtagtttggtggctgtgtctc

SEQ ID NO: 251 - DNA, 39 bp, synthetic construct
  source 1..39: mol_type = other DNA
taatacgactcactatagggtaactggaacaacgaccgg

SEQ ID NO: 252 - DNA, 40 bp, synthetic construct
  source 1..40: mol_type = other DNA
taatacgactcactatagggttgtgtgaagaggtacacgg

SEQ ID NO: 253 - DNA, 39 bp, synthetic construct
  source 1..39: mol_type = other DNA
taatacgactcactatagggagatgcctgtaatgcctgc

SEQ ID NO: 254 - DNA, 40 bp, synthetic construct
  source 1..40: mol_type = other DNA
taatacgactcactataggggttggatggccaggaattca

SEQ ID NO: 255 - DNA, 40 bp, synthetic construct
  source 1..40: mol_type = other DNA
taatacgactcactataggggttctatccggcattgagtg

SEQ ID NO: 256 - DNA, 40 bp, synthetic construct
  source 1..40: mol_type = other DNA
taatacgactcactatagggatattgcgggctgaaaagcg

SEQ ID NO: 257 - DNA, 40 bp, synthetic construct; identical to SEQ ID NO: 256
  source 1..40: mol_type = other DNA

SEQ ID NO: 258 - DNA, 40 bp, synthetic construct
  source 1..40: mol_type = other DNA
taatacgactcactataggggaagcagttctcgccgaatc

SEQ ID NO: 259 - DNA, 40 bp, synthetic construct
  source 1..40: mol_type = other DNA
taatacgactcactatagggcgcaggatacgtcgtcatca

SEQ ID NO: 260 - DNA, 41 bp, synthetic construct
  source 1..41: mol_type = other DNA
taatacgactcactatagggaccagctcgtttaaagcctca

SEQ ID NO: 261 - DNA, 40 bp, synthetic construct
  source 1..40: mol_type = other DNA
taatacgactcactatagggggaaagcctggtcgaggtaa

SEQ ID NO: 262 - DNA, 40 bp, synthetic construct
  source 1..40: mol_type = other DNA
taatacgactcactatagggggcgatggaaggacgatgat

SEQ ID NO: 263 - DNA, 42 bp, synthetic construct
  source 1..42: mol_type = other DNA
taatacgactcactatagggtcccatttcggtctatgatcca

SEQ ID NO: 264 - DNA, 40 bp, synthetic construct
  source 1..40: mol_type = other DNA
taatacgactcactatagggacttccagtggacacagcaa

SEQ ID NO: 265 - DNA, 40 bp, synthetic construct
  source 1..40: mol_type = other DNA
taatacgactcactatagggctttgctgtcagccagaacg

SEQ ID NO: 266 - DNA, 40 bp, synthetic construct
  source 1..40: mol_type = other DNA
taatacgactcactatagggcagaaagcgtacgacgaagc

SEQ ID NO: 267 - DNA, 40 bp, synthetic construct
  source 1..40: mol_type = other DNA
taatacgactcactatagggcgcatgagcatggggatact

SEQ ID NO: 268 - DNA, 40 bp, synthetic construct
  source 1..40: mol_type = other DNA
taatacgactcactatagggcgttgatgtggtcccttgga

SEQ ID NO: 269 - DNA, 40 bp, synthetic construct
  source 1..40: mol_type = other DNA
taatacgactcactataggggttggcatttgtccacccaa

SEQ ID NO: 270 - DNA, 40 bp, synthetic construct
  source 1..40: mol_type = other DNA
taatacgactcactatagggggacggcaatgtcgaaatgg

SEQ ID NO: 271 - DNA, 40 bp, synthetic construct
  source 1..40: mol_type = other DNA
taatacgactcactataggggcatcgctgtttccactagt

SEQ ID NO: 272 - DNA, 40 bp, synthetic construct
  source 1..40: mol_type = other DNA
taatacgactcactatagggtcctgaacctgttcccttgc

SEQ ID NO: 273 - DNA, 40 bp, synthetic construct
  source 1..40: mol_type = other DNA
taatacgactcactatagggttagttgagcaacggcagga

SEQ ID NO: 274 - DNA, 40 bp, synthetic construct
  source 1..40: mol_type = other DNA
taatacgactcactatagggctgcatattccagcaaccgc

SEQ ID NO: 275 - DNA, 40 bp, synthetic construct
  source 1..40: mol_type = other DNA
taatacgactcactataggggaaccggtgaaacgcaatca

SEQ ID NO: 276 - DNA, 40 bp, synthetic construct
  source 1..40: mol_type = other DNA
taatacgactcactatagggcgatgagagtgggaatcgca

SEQ ID NO: 277 - DNA, 40 bp, synthetic construct
  source 1..40: mol_type = other DNA
taatacgactcactatagggtagcggatttggcctcagac

SEQ ID NO: 278 - DNA, 40 bp, synthetic construct
  source 1..40: mol_type = other DNA
taatacgactcactatagggttgccgtcaaccatttgtcg

SEQ ID NO: 279 - DNA, 40 bp, synthetic construct
  source 1..40: mol_type = other DNA
taatacgactcactataggggcaacttccatctgaacggg

SEQ ID NO: 280 - DNA, 40 bp, synthetic construct
  source 1..40: mol_type = other DNA
taatacgactcactataggggcgttgcttcccttgacaaa

SEQ ID NO: 281 - DNA, 40 bp, synthetic construct
  source 1..40: mol_type = other DNA
taatacgactcactatagggaaatcgacaccaccaagcct

SEQ ID NO: 282 - DNA, 40 bp, synthetic construct
  source 1..40: mol_type = other DNA
taatacgactcactataggggcactgaagcagagcaagtc

SEQ ID NO: 283 - DNA, 40 bp, synthetic construct
  source 1..40: mol_type = other DNA
taatacgactcactatagggttgaggtcttccagcacgtc

SEQ ID NO: 284 - DNA, 40 bp, synthetic construct
  source 1..40: mol_type = other DNA
taatacgactcactatagggagagttgcgggacctgattt

SEQ ID NO: 285 - DNA, 40 bp, synthetic construct
  source 1..40: mol_type = other DNA
taatacgactcactatagggggcccacctaagttttccca

SEQ ID NO: 286 - DNA, 40 bp, synthetic construct
  source 1..40: mol_type = other DNA
taatacgactcactataggggctgcttgcactatcgaaaa

SEQ ID NO: 287 - DNA, 40 bp, synthetic construct
  source 1..40: mol_type = other DNA
taatacgactcactatagggggatttttggccacggcttt

SEQ ID NO: 288 - DNA, 40 bp, synthetic construct
  source 1..40: mol_type = other DNA
taatacgactcactatagggaactgtggggcattgatcgt

SEQ ID NO: 289 - DNA, 40 bp, synthetic construct
  source 1..40: mol_type = other DNA
taatacgactcactatagggtaggcgaccaacttctacgg

SEQ ID NO: 290 - DNA, 40 bp, synthetic construct
  source 1..40: mol_type = other DNA
taatacgactcactatagggccggccaaaaaccactcttc

SEQ ID NO: 291 - DNA, 40 bp, synthetic construct
  source 1..40: mol_type = other DNA
taatacgactcactatagggcatgtgacgccagaccaaac

SEQ ID NO: 292 - DNA, 40 bp, synthetic construct
  source 1..40: mol_type = other DNA
taatacgactcactatagggggaacacgaggaccgctatt

SEQ ID NO: 293 - DNA, 40 bp, synthetic construct
  source 1..40: mol_type = other DNA
taatacgactcactatagggtgacctgtagattggcacgg

SEQ ID NO: 294 - DNA, 40 bp, synthetic construct
  source 1..40: mol_type = other DNA
taatacgactcactatagggagccagaagtgtggtaagcc

SEQ ID NO: 295 - DNA, 40 bp, synthetic construct
  source 1..40: mol_type = other DNA
taatacgactcactatagggtctttgaacgtcttggggca

SEQ ID NO: 296 - DNA, 40 bp, synthetic construct
  source 1..40: mol_type = other DNA
taatacgactcactatagggccaatgcacgagccaagatc

SEQ ID NO: 297 - DNA, 40 bp, synthetic construct
  source 1..40: mol_type = other DNA
taatacgactcactatagggactgtgccatcggtctgtta

SEQ ID NO: 298 - DNA, 40 bp, synthetic construct
  source 1..40: mol_type = other DNA
taatacgactcactatagggatggtttgactgggacctgg

SEQ ID NO: 299 - DNA, 40 bp, synthetic construct
  source 1..40: mol_type = other DNA
taatacgactcactatagggttgcttgtaaaggtgcccac

SEQ ID NO: 300 - DNA, 40 bp, synthetic construct
  source 1..40: mol_type = other DNA
taatacgactcactatagggccaaaacaagcgtgctggaa

SEQ ID NO: 301 - DNA, 41 bp, synthetic construct
  source 1..41: mol_type = other DNA
taatacgactcactatagggcctcttctgcagttggatcca

SEQ ID NO: 302 - DNA, 40 bp, synthetic construct
  source 1..40: mol_type = other DNA
taatacgactcactataggggctttggatgtttggtgggg

SEQ ID NO: 303 - DNA, 40 bp, synthetic construct
  source 1..40: mol_type = other DNA
taatacgactcactataggggctgtagccgccgtagataa

SEQ ID NO: 304 - DNA, 41 bp, synthetic construct
  source 1..41: mol_type = other DNA
taatacgactcactatagggtcagtggatgggatagggtgt

SEQ ID NO: 305 - DNA, 40 bp, synthetic construct
  source 1..40: mol_type = other DNA
taatacgactcactatagggaaaggcggcttgtaggtgaa

SEQ ID NO: 306 - DNA, 40 bp, synthetic construct
  source 1..40: mol_type = other DNA
taatacgactcactatagggtgtgtccacgactgtccaag

SEQ ID NO: 307 - DNA, 40 bp, synthetic construct
  source 1..40: mol_type = other DNA
taatacgactcactatagggtgacccttgactgaccctct

SEQ ID NO: 308 - DNA, 40 bp, synthetic construct
  source 1..40: mol_type = other DNA
taatacgactcactatagggacacccgaatctaaccaccg

SEQ ID NO: 309 - DNA, 40 bp, synthetic construct
  source 1..40: mol_type = other DNA
taatacgactcactatagggaaacccgcgttttcagtgtc

SEQ ID NO: 310 - DNA, 40 bp, synthetic construct
  source 1..40: mol_type = other DNA
taatacgactcactatagggttgaaaggcgagcaactagc

SEQ ID NO: 311 - DNA, 40 bp, synthetic construct
  source 1..40: mol_type = other DNA
taatacgactcactatagggacaaattctgcgtctccgga

SEQ ID NO: 312 - DNA, 41 bp, synthetic construct
  source 1..41: mol_type = other DNA
taatacgactcactataggggttcctggagctgaacactct

SEQ ID NO: 313 - DNA, 40 bp, synthetic construct
  source 1..40: mol_type = other DNA
taatacgactcactatagggaaattgacaacccagcgtgc

SEQ ID NO: 314 - DNA, 40 bp, synthetic construct
  source 1..40: mol_type = other DNA
taatacgactcactatagggtggtcgctcacagtttacct

SEQ ID NO: 315 - DNA, 40 bp, synthetic construct
  source 1..40: mol_type = other DNA
taatacgactcactatagggtggagcttcaggcatttcgt

SEQ ID NO: 316 - DNA, 40 bp, synthetic construct; identical to SEQ ID NO: 266
  source 1..40: mol_type = other DNA

SEQ ID NO: 317 - DNA, 40 bp, synthetic construct; identical to SEQ ID NO: 267
  source 1..40: mol_type = other DNA

SEQ ID NO: 318 - DNA, 40 bp, synthetic construct
  source 1..40: mol_type = other DNA
taatacgactcactataggggtgatgttgcggcttcttcc

SEQ ID NO: 319 - DNA, 40 bp, synthetic construct
  source 1..40: mol_type = other DNA
taatacgactcactatagggcttgcggctgataagttggc

SEQ ID NO: 320 - DNA, 40 bp, synthetic construct
  source 1..40: mol_type = other DNA
taatacgactcactatagggtggaaaacccaaaatgcccg

SEQ ID NO: 321 - DNA, 40 bp, synthetic construct
  source 1..40: mol_type = other DNA
taatacgactcactatagggaagtgttcaccggtgtccat

SEQ ID NO: 322 - DNA, 40 bp, synthetic construct
  source 1..40: mol_type = other DNA
taatacgactcactatagggggagtgtggagtgagagcag

SEQ ID NO: 323 - DNA, 40 bp, synthetic construct
  source 1..40: mol_type = other DNA
taatacgactcactataggggacaagtggtgtttgccgac

SEQ ID NO: 324 - DNA, 40 bp, synthetic construct
  source 1..40: mol_type = other DNA
taatacgactcactataggggggagacacaaaccgggtat

SEQ ID NO: 325 - DNA, 40 bp, synthetic construct
  source 1..40: mol_type = other DNA
taatacgactcactatagggggtgaaccaattgagcctgc

SEQ ID NO: 326 - DNA, 40 bp, synthetic construct
  source 1..40: mol_type = other DNA
taatacgactcactatagggcccgaagagcagatctaccg

SEQ ID NO: 327 - DNA, 40 bp, synthetic construct
  source 1..40: mol_type = other DNA
taatacgactcactatagggcaggtttctccatggccact

SEQ ID NO: 328 - DNA, 40 bp, synthetic construct
  source 1..40: mol_type = other DNA
taatacgactcactatagggcatccgccaaacaagacacc

SEQ ID NO: 329 - DNA, 40 bp, synthetic construct
  source 1..40: mol_type = other DNA
taatacgactcactataggggcgtctcttcgtcgaactct

SEQ ID NO: 330 - DNA, 40 bp, synthetic construct
  source 1..40: mol_type = other DNA
taatacgactcactatagggccttgcgtccaaagagaacg

SEQ ID NO: 331 - DNA, 40 bp, synthetic construct
  source 1..40: mol_type = other DNA
taatacgactcactatagggcaacaccgtcgattgatgca

SEQ ID NO: 332 - DNA, 40 bp, synthetic construct
  source 1..40: mol_type = other DNA
taatacgactcactatagggaggaatgtgtgcactgagct

SEQ ID NO: 333 - DNA, 40 bp, synthetic construct
  source 1..40: mol_type = other DNA
taatacgactcactatagggtacatcgcgttgggcatgta

SEQ ID NO: 334 - DNA, 40 bp, synthetic construct
  source 1..40: mol_type = other DNA
taatacgactcactatagggtgcacagaactcgaggttgt

SEQ ID NO: 335 - DNA, 40 bp, synthetic construct
  source 1..40: mol_type = other DNA
taatacgactcactataggggaggagtgggcttgtttgga

SEQ ID NO: 336 - DNA, 40 bp, synthetic construct
  source 1..40: mol_type = other DNA
taatacgactcactatagggtgtggatactgcgggacaag

SEQ ID NO: 337 - DNA, 40 bp, synthetic construct
  source 1..40: mol_type = other DNA
taatacgactcactatagggtcgttttgctttgcagaggc

SEQ ID NO: 338 - DNA, 40 bp, synthetic construct
  source 1..40: mol_type = other DNA
taatacgactcactatagggaccagacacagttgggacag

SEQ ID NO: 339 - DNA, 40 bp, synthetic construct
  source 1..40: mol_type = other DNA
taatacgactcactatagggtgtgcacagacggtaggaac

SEQ ID NO: 340 - DNA, 40 bp, synthetic construct
  source 1..40: mol_type = other DNA
taatacgactcactatagggtactgctgcatagttggcct

SEQ ID NO: 341 - DNA, 40 bp, synthetic construct
  source 1..40: mol_type = other DNA
taatacgactcactatagggagccctaggtcattttcggg

SEQ ID NO: 342 - DNA, 40 bp, synthetic construct
  source 1..40: mol_type = other DNA
taatacgactcactatagggaggggttctatcgctcaacc

SEQ ID NO: 343 - DNA, 40 bp, synthetic construct
  source 1..40: mol_type = other DNA
taatacgactcactatagggctggcgcatacaatctgcac

SEQ ID NO: 344 - DNA, 39 bp, synthetic construct
  source 1..39: mol_type = other DNA
taatacgactcactataggggggttgtttgtgacggtgc

SEQ ID NO: 345 - DNA, 43 bp, synthetic construct
  source 1..43: mol_type = other DNA
taatacgactcactatagggtcacagagttatcatcgtccaca

SEQ ID NO: 346 - DNA, 40 bp, synthetic construct
  source 1..40: mol_type = other DNA
taatacgactcactatagggtcactgacactgatgccgat

SEQ ID NO: 347 - DNA, 40 bp, synthetic construct
  source 1..40: mol_type = other DNA
taatacgactcactatagggcccaagccactgtgttcaac

SEQ ID NO: 348 - DNA, 40 bp, synthetic construct
  source 1..40: mol_type = other DNA
taatacgactcactatagggggctcctctcctgaagatgg

SEQ ID NO: 349 - DNA, 40 bp, synthetic construct
  source 1..40: mol_type = other DNA
taatacgactcactatagggacccgaggcctgtacatttc

SEQ ID NO: 350 - DNA, 40 bp, synthetic construct
  source 1..40: mol_type = other DNA
taatacgactcactatagggatggcatcttagcgtacgca

SEQ ID NO: 351 - DNA, 40 bp, synthetic construct
  source 1..40: mol_type = other DNA
taatacgactcactatagggacctgtaaatctgccgtgca

SEQ ID NO: 352 - DNA, 40 bp, synthetic construct
  source 1..40: mol_type = other DNA
taatacgactcactatagggcaaaccgtttccagcttggg

SEQ ID NO: 353 - DNA, 40 bp, synthetic construct
  source 1..40: mol_type = other DNA
taatacgactcactatagggggacacaatacccgggtctc

SEQ ID NO: 354 - DNA, 40 bp, synthetic construct; identical to SEQ ID NO: 218
  source 1..40: mol_type = other DNA

SEQ ID NO: 355 - DNA, 40 bp, synthetic construct; identical to SEQ ID NO: 219
  source 1..40: mol_type = other DNA

SEQ ID NO: 356 - DNA, 40 bp, synthetic construct
  source 1..40: mol_type = other DNA
taatacgactcactatagggtgctcggaaatcacgaccaa

SEQ ID NO: 357 - DNA, 40 bp, synthetic construct
  source 1..40: mol_type = other DNA
taatacgactcactataggggggttcgtcgaaaatcctgc

SEQ ID NO: 358 - DNA, 40 bp, synthetic construct
  source 1..40: mol_type = other DNA
taatacgactcactatagggtccgcttctggatggacatg

SEQ ID NO: 359 - DNA, 39 bp, synthetic construct
  source 1..39: mol_type = other DNA
taatacgactcactataggggtagcgcatcttctcgtcc

SEQ ID NO: 360 - DNA, 40 bp, synthetic construct
  source 1..40: mol_type = other DNA
taatacgactcactatagggcgataaaccgagagctgcct

SEQ ID NO: 361 - DNA, 40 bp, synthetic construct
  source 1..40: mol_type = other DNA
taatacgactcactatagggttggggcttttctcctgctt

SEQ ID NO: 362 - DNA, 40 bp, synthetic construct
  source 1..40: mol_type = other DNA
taatacgactcactatagggagtgtgtactacgggaccga

SEQ ID NO: 363 - DNA, 40 bp, synthetic construct
  source 1..40: mol_type = other DNA
taatacgactcactatagggtctgttggaattttctgctc

SEQ ID NO: 364 - DNA, 40 bp, synthetic construct
  source 1..40: mol_type = other DNA
taatacgactcactatagggactaccgcaatccgagagtg

SEQ ID NO: 365 - DNA, 40 bp, synthetic construct
  source 1..40: mol_type = other DNA
taatacgactcactatagggctgcatcgccgaggtaatct

SEQ ID NO: 366 - DNA, 40 bp, synthetic construct
  source 1..40: mol_type = other DNA
taatacgactcactatagggtgaagttggagcccttcacc

SEQ ID NO: 367 - DNA, 40 bp, synthetic construct
  source 1..40: mol_type = other DNA
taatacgactcactatagggagccagtggtacaggaaacg

SEQ ID NO: 368 - DNA, 39 bp, synthetic construct
  source 1..39: mol_type = other DNA
taatacgactcactatagggtcatctctctcgccccgat

SEQ ID NO: 369 - DNA, 40 bp, synthetic construct
  source 1..40: mol_type = other DNA
taatacgactcactatagggtctgcagcattctcggttgt

SEQ ID NO: 370 - DNA, 40 bp, synthetic construct
  source 1..40: mol_type = other DNA
taatacgactcactatagggcggttacagcttaaagccgc

SEQ ID NO: 371 - DNA, 41 bp, synthetic construct
  source 1..41: mol_type = other DNA
taatacgactcactatagggtagtaaagctggcgtcacctc

SEQ ID NO: 372 - DNA, 41 bp, synthetic construct; identical to SEQ ID NO: 200
  source 1..41: mol_type = other DNA

SEQ ID NO: 373 - DNA, 41 bp, synthetic construct
  source 1..41: mol_type = other DNA
taatacgactcactataggggctggtcctgaagactatcca

SEQ ID NO: 374 - DNA, 41 bp, synthetic construct; identical to SEQ ID NO: 194
  source 1..41: mol_type = other DNA

SEQ ID NO: 375 - DNA, 41 bp, synthetic construct
  source 1..41: mol_type = other DNA
taatacgactcactatagggcattctctcaaacgctggcac

SEQ ID NO: 376 - DNA, 19 bp, synthetic construct
  source 1..19: mol_type = other DNA
agaccaccgcaatggtatc

SEQ ID NO: 377 - DNA, 21 bp, synthetic construct
  source 1..21: mol_type = other DNA
ggacttcattctggcgtactg

SEQ ID NO: 378 - DNA, 20 bp, synthetic construct
  source 1..20: mol_type = other DNA
aaaagccccacctatcgttg

SEQ ID NO: 379 - DNA, 21 bp, synthetic construct
  source 1..21: mol_type = other DNA
cactaaggttgccagctacag

SEQ ID NO: 380 - DNA, 22 bp, synthetic construct
  source 1..22: mol_type = other DNA
gccaataccaacacagctgtat

SEQ ID NO: 381 - DNA, 21 bp, synthetic construct
  source 1..21: mol_type = other DNA
ggcctcagagatttccttagc

SEQ ID NO: 382 - DNA, 20 bp, synthetic construct
  source 1..20: mol_type = other DNA
caactacatcttcggcgagc

SEQ ID NO: 383 - DNA, 20 bp, synthetic construct
  source 1..20: mol_type = other DNA
gtacacggatgcccaacttc

SEQ ID NO: 384 - DNA, 22 bp, synthetic construct
  source 1..22: mol_type = other DNA
cgcctactatcagctcaaacag

SEQ ID NO: 385 - DNA, 20 bp, synthetic construct
  source 1..20: mol_type = other DNA
cgcacgtttcgacactgtaa

SEQ ID NO: 386 - DNA, 21 bp, synthetic construct
  source 1..21: mol_type = other DNA
agccatctgtggagcaatcat

SEQ ID NO: 387 - DNA, 19 bp, synthetic construct
  source 1..19: mol_type = other DNA
ctttgatgtcggtccgctt

SEQ ID NO: 388 - DNA, 20 bp, synthetic construct
  source 1..20: mol_type = other DNA
gcccgcgagatcactcaact

SEQ ID NO: 389 - DNA, 19 bp, synthetic construct
  source 1..19: mol_type = other DNA
gtgagcgagtcgttgttgc

SEQ ID NO: 390 - DNA, 20 bp, synthetic construct
  source 1..20: mol_type = other DNA
gcatagacagcaagcacagc

SEQ ID NO: 391 - DNA, 20 bp, synthetic construct
  source 1..20: mol_type = other DNA
aggtccagagcctccaactc

SEQ ID NO: 392 - RNA, 246 nt, Bemisia tabaci
  source 1..246: mol_type = other RNA
atggccaaaagtaaaaatcacacgaataaaaatcaaaacaggaaagaccaccgcaatggtatcaaaaaagcaaagaagcacagatacatctccacgagaggagtagatcacaagttcctgaggaatttgaaatactcgaagaaaggcaacctctcacccgcaaaacagtacgccagaatgaagtcccgtctggaaaagaggaaaaagtttgctgaccagccacccattcaactagctgtccattag

SEQ ID NO: 393 - RNA, 300 nt, Cucumber mosaic virus
  source 1..300: mol_type = other RNA
tatgtaattgaacgtaggtgcaatgacaaacgtcgaactccaactggctcgtatggtggaggcgaagaagcagagacgaaggtctcacaaacagaatcgacgggaacgaggtcacaaaagtcccagcgagagagctcgttcaaatctcagactattccgcttcctaccattctatcagatagatggttcggaactgacagggtcatgccgccatatgaacatggcggagttacccgagtctgaggcctctcgtttagagttatcggcggaagaccatgattttgacgatacagattggtt

SEQ ID NO: 394 - RNA, 228 nt, synthetic construct
  source 1..228: mol_type = other RNA
ggcacaagctggagtacaactacaacagccacaacgtctatatcatggccgacaagcagaagaacggcatcaaggtgaacttcaagatccgccacaacatcgaggacggcagcgtgcagctcgccgaccactaccagcagaacacccccatcggcgacggccccgtgctgctgcccgacaaccactacctgagcacccagtccgccctgagcaaagaccccaacgaga

SEQ ID NO: 395 - RNA, 467 nt, synthetic construct
  source 1..467: mol_type = other RNA
cagaactgaagtatgtgttggaaaaagcgcacgcattttttcaagagagtttctgtttaaaacagcaagagggcgccagtggctcgggcaacaacgactcgctcacgaaagcactcatcagcgatgaaagccagcagcagtcctctcgcggtagattagggtttgtcgctggagttgtgccgcgggaaagagtgccagcgtttgagagaatgaacacagtgaccggtgcaagagggaatcatgtgacgaagatccacaagacttgtcggagtcaagtgagcccgctaataatgatctgaactgtcgcagcatttcaagattagacatggaaaatgactcggatcacgagccggaaaggtatacttctccctcgccctacgacaactggagcatagacagcaagcacagcgacgaggatgcaatgcgagatgtaaacagccctggcatggatagtcttcaggaccagc
